United States Patent Application Publication US 2007/0021600 A1 - sequence listing, part 2

SEQ ID NO: 3862 - protein, 65 aa, Enterococcus faecalis
RKNEKSKIGSGKMIELIVLLTVFTYGTNFVLYLILKNKKSMPIVEKASIVLGINMSVLLLDGIFA

SEQ ID NO: 3863 - protein, 315 aa, Enterococcus faecalis
INTKTFSLFIYQSLTTLKKTKEGTTMPKFSPCLWFNTQAEEAANFYTTIFEKGAILSKTNYVNEEHQPQGTSLMTIEFTLANQTIIGLNGGPEFSFTPASSFFVECTTLPQTETLWKNLTADGQILMPFGEYPFSPLYGWVVDKFGVSWQVSFSGKEQTIVPTFMFANEKYGEAAKALSEWLAIFGPGEIIEKVEYEDGNIAQALFTLQEQPFRVMDARDKHDFDFTMAFSIYIDCENQEEIDRLWQQVTAKGKEWPCGWMEDQFGVSWQTGNPELKRYLSDSNPARANEVTKKLYQMKKIDLNQLKEVYDKYNH

SEQ ID NO: 3864 - protein, 71 aa, Enterococcus faecalis
LAGPIRGGEDWAWGNRCFQERRITEKIPFQTLGEKYWRSFYFLTRGHLKSSLLQEVKQAIYRFYQTEMNKY

SEQ ID NO: 3865 - protein, 280 aa, Enterococcus faecalis
RNNRGSEGMSTVINGRELADQMQAEIQKDVEKMTQQGIQPGLVVLLVGENPASQTYVRNKERAAAKIGILSKVEKLPETISEEELLAEIDKYNQDSRFHGILVQLPLPKHIDEEKILLAIDPKKDVDGFHPMNLGRLFVGKPEMIPCTPYGIMKMFEAYDIDLTGKRAVVIGRSNIVGKPMAQLLLMKNATVTIAHSKTEHLAEVAKEADILVVAIGRGHFVTKEFVKPGAVVIDVGMNRNQEGKLIGDVAFDEVSEIASYITPVPKGVGPMRRLQPRSS

SEQ ID NO: 3866 - protein, 162 aa, Enterococcus faecalis
MNYSQKMKMEKRMSKTELTRHEIREKALQALFPLDFNADLTKQDAIDYALAYDNREIVSEDGEDLVPTYLDLLVGGVCSRKAELDEVITNHLGNNWSMQRLAKIDIVILRLAIFEMLYVSDVPNIVALNEAVELSKKYSDDRSRKFVNGVLSNVLKEIDSEA

SEQ ID NO: 3867 - protein, 159 aa, Enterococcus faecalis
  MISC_FEATURE (7)..(7): Amino acid 7 is Xaa wherein Xaa = any amino acid.
GQSRAEXRVINKEDKHMSEKKNLVINANDSLGEIVIAPEVIEVIIGIAASKVEGVYGMRGTFANNVNELLGRAAHGKGVYLRTEEEGLKVDIYCYLNYGVSVPKVALEMQDRVKQQVLFMTDIDLVEVNIHVVAVVPEKIPQPDLNELFPEDEDGEENE

SEQ ID NO: 3868 - protein, 259 aa, Enterococcus faecalis
GGNEMKPVVELKNATKIIDNGMNEKKVILDHVNLAIYPGDFITVLGGNGAGKSTLFNSLAGTLTLTEGQFLIEGVNRTNLSEVKRAKSLARVFQDPKMGTAPRMTVAENLLLAMKRGQKRPLTLRKINEQRALFTKICQEVGNGLENHLDTPTGNLSGGQRQALSLLMATITKPELLLLDEHTAALDPKTSKQLMHLTEQRIEEGNLTCLMITHRMEDALRYGNRLIVLQKGKIVQDLNAAEKAQLTLQDLLLFFEEVE

SEQ ID NO: 3869 - protein, 303 aa, Enterococcus faecalis
  MISC_FEATURE (31)..(36): Amino acids 31 and 36 are Xaa wherein Xaa = any amino acid.
LSKKVGEAMIVSPIEQGMLWALLGLGIFMTXRILNXPDMTTEGSFPLGGAVCVTAITTGVSPFIATLLGVGAGMLAGLVTGLLFTKGKIPIILAGILVMSGLNSVILFVMKSPNKSLLNQPKIQDVFQKMALPDYYDTIFLGISVLAVVMILLLFFFNTSLGQAYIATGDNEEMARSIGIQTDRMKILGLVLSNGLIGLSGALIAQNDGYADVSKGTGVIVIGLASLIIGEVLFGELTFGERLMAIVVGSIIYQLLILLVIKLGFDTTYLKIFSAVILAICLMIPQLKKALRLHGFSDKGETK

SEQ ID NO: 3870 - protein, 604 aa, Enterococcus faecalis
  MISC_FEATURE (600)..(600): Amino acid 600 is Xaa wherein Xaa = any amino acid.
PIPWARVFENMGCSGGETSKTMDSLKKSIQGLPTPLDSAIKGVQLIASSTNDLGKSEQIFAALNNGILGFGGSAEMVENAIIQLSQSFSNGKVDAETWNSMINSGLGPALNALAKQMGLTAGQMKAGLSDGSISVEEFQDALIKLNKEGGGGLKSLEQIAKDSTAGIKTGLANMKTAIVRGVANVVTKIDEGLKSAGFGSISEIIADKGAKMEAALSKFAEMIPPMIKTAKTLYDTLKPYAPLLAGLAGSIGTLMLAKKVSAAFTAWQKATEGLSIAQAILNSTMLANPFVAILAAVVGLVTGFIYLWKTNEGFRDAVKNIWKNIQEFISSAAETVVKAWDSTMKFFSNMWDGTKEAFSNAGTWMKEVPGNAADWVKNKWNGTKEFFSGLWNSTKEGSKNTWENIKQSAADSAKSVGESFKNGFDNVKDWFKGVGKSISDVFTTAFDFVWKYIGPYVTGIKNAFKMVVNAMKANIENVKMIAENVVTILKNVLLAPILFITSMITGGWEEAKENMIAVWDNIAEAAQTIWFGIKNIFYNTVTAISYSVTSIFNGLMLTIKKIWIDVKLFFTLLWIDIKYGAINVWIEIKYSIIETLDKYXFGSN

SEQ ID NO: 3871 - protein, 640 aa, Enterococcus faecalis
IQNFNWKVGISIMCGIVGMIGKENVTESLIQGLTKLEYRRYDSAGICVNDQSQQPHVVKAVGGIADLAAKLTPEIDGTVGIGHTRWATHGEPTVANAHPHVSSDQRFALVHNGVIENFEELKEQFLSGAHLIGDTDTEIVVQLIAHFAENGFSTKDAFKAALAEIKGSYAFALMDKMDPNIIYVAKNKSPLLIGLGEGFNVICSDAMAMIKETNQFVEIVDGEIVTVTADKVVIETPEGQVINREPFEAQLDLNDIEKGTYPFYMLKEIDEQPAVMRKIVQAYTQGEKVTLDEALLEKINQCNRIYIIACGTSYNAGWVGKSLIETIASIPVEVHLSSEFGYNMPILSEKPFFIFLSQSGETADSRQVLVQVNELGHPSLTLTNVAGSTLSREADDTLLLHAGPEIAVASTKAYTAQIAVLAILAKAIGEERQTLAAVSFDVAHELSVVAAVMETLIDEKQQMKALVEDYLTYTRNAFYFGRGVDHYVSIVPAPSLVLLFSLFLLSPSPPFLFFSSPSSLSLSFFSPSPFISLSFFSLFSFFFSSLFSLLLTSSFFPSSPPLSSSPLSSSLFFPSLSLLLSHFSSLSSLSLLPSPLSLLLLLRLPPSFLSSLSPSFVPLSSLFLSSSLFALLLPSFFFTS

SEQ ID NO: 3872 - protein, 94 aa, Enterococcus faecalis
ERRREREGKKRDDERGEEERGGEEGKKEEVRSRENKEEKKNEKREKKEREMKGEGEKKEREREEGEEKKRNGGEGERRNRENKRTREGAGTIDT

SEQ ID NO: 3873 - protein, 86 aa, Enterococcus faecalis
RRKKEEEEQKERRRGRERREERRKERGKREKREEGAGEEGGRGEKEGEKEKRGRRNERGGEKEKERREMMREERKKEEEKKEKRKK

SEQ ID NO: 3874 - protein, 437 aa, Enterococcus faecalis
  MISC_FEATURE (240)..(240): Amino acid 240 is Xaa wherein Xaa = any amino acid.
FKNVYFFFPQKKRGPPPFFFFLKKRGGKKNLGFFFAIMPLTIIGSIFMLITDFPVAGYGDFMAGIFGAGWADMISPAYRATFNMMGIIFAGTMSYKLAESYEMDRLTSLILGIVAYVVVLPKTVTTESGEVVTKVLSFDWLGTQGVITAIIMSILSVELTRFCIKKKLVIKMPDSVPSMVSQAFSALIPGIFVVAVALLINGIGLSFADSFPQLIYAVIQAPLQGLIGTPFAIIIVAGLXGLFWWFGIHPTVINSMLYPILYANADKNQSLAELGQLTAQSGNFGTVQMLDQFATIGGAGCTIGLAIAMAIVGHSSRMKAMSKISFVPAFFNINEPLIFGLPVIFNPLLLIPIAVAPIVSVLIAFLSMKIGFMPMFTNIQAPWATPFLFSGFLVGKWQGAVTQVLAVAASVVIYYPFVKALDRQYQKEEAHEVPETL

SEQ ID NO: 3875 - protein, 87 aa, Enterococcus faecalis
MFVNIGMNPIFIDRKAIKTDTIGATAIGINNKGLKITGSPKIKGSLMLKNAGTNEIFDMAFILDECPTMAIAIAKPIVQPAPPIVAN

SEQ ID NO: 3876 - protein, 102 aa, Enterococcus faecalis
IDNIKKKKPMKYQKHCRERGVKEMHVENDENICCEVEKGMEKMYHPMVPELVQTSSFYFPTYEEFMAASIDEKNNYVYTRWHQPHNRNFREKNCSFGTWKKM

SEQ ID NO: 3877 - protein, 80 aa, Enterococcus faecalis
MKKIIMFTHVGTNPTTEILEKKIARLERGKKCKVFASGMGAISATLFTLLQQGDHVLMVNTIYGKICFVCAIFRKNLGFP

SEQ ID NO: 3878 - protein, 295 aa, Enterococcus faecalis
  MISC_FEATURE (129)..(129): Amino acid 129 is Xaa wherein Xaa = any amino acid.
QENNSMYNHVYLKEDIDALINEFGKLNAEDESLFRFLSKKIIFLKEIKISIVNTTVIFYIDQMISDLMYLMASYHKGEVRYFYLNIRSVIEAFSRLFSEVETSTNRITMTTLLDNIANYITLNDLRDSXEDSLDYPRLKGLYRECCLYVHGNINAKYSLIEFYNELLNEEITSAQKRKMSNDIKFLASILTNISCYRYSITLNDVFFRGKNKLGYLIGEFGVKIVKTYSNFIFSCLSGGESIYNVVLTSKKGSKLKVIDFNSDEYEMSYCFRPDTLFFEDYDVYSKCILKKKSYR

SEQ ID NO: 3879 - protein, 114 aa, Enterococcus faecalis
FTRFSTWVHAYANSLGGSTIGKLLSLFVGVLIFTFGCALYMATDQGESPYDAIAPTICQQTNKPYASVRKAQDLLVLLIGFIAGGPIGIGTIICAFGAGPLISFWNKLLQPLVK

SEQ ID NO: 3880 - protein, 185 aa, Enterococcus faecalis
LLISESLAVSQATTTFIDQLRILAPFGTDNTVPTFVFKEITPTQIRQIGADNAHLKFQMNQEGAQLDAIAFQMGPQADELAQGTADVAGQLSINEWNGRKKPQLMVTDFAVLGRQLFDFRGKNNQTKPIPSEATAYLLFDEKNQKFISDPTANIIVWSNQEELVEAVSQNQIEQLFLSTSRPREG

SEQ ID NO: 3881 - protein, 117 aa, Enterococcus faecalis
GGTMAFTTTAAVEGSTVFYKVHPSAKRYTLKDNGFTETKSGNFQLIRSLDPTPQRNEGFKLKITITADLKELKMSITTANGLKPMNIFKNEQHEMSKEKYFFLMDGLISRGVLEKVE

SEQ ID NO: 3882 - protein, 147 aa, Enterococcus faecalis
NDGDKMADNSKTRVVVGMSGGVDSSVTALLLKEQGYDVIGIFMKNWDDTDENGVCTATEDYKDVAKVADQIGIPYYSVNFEKEYWDRVFEYFLAEYRLGRTPNPDVMCNKEIKFKAFLDYAMQLGADYVATGHYAQVETDENGVVHM

SEQ ID NO: 3883 - protein, 200 aa, Enterococcus faecalis
RGIDNNKDQTYFLSQLSQAQLAKTMFPLGGMEKSEVRAIAERAGLATAKKKDSTGVCFIGEKNFKEFLSNYLPAKKGNMVTEDGEIKGQHDGLMYYTIGQRQGLGIGGGGKTQEPWFVIGKDLTTNTLYVGQGFHHEKLYATHLEASEVHFTVDTPMPKEFDCTAKFRYRQADIPVHVSLSEDRTKATVKFVFTPGNRRN

SEQ ID NO: 3884 - protein, 448 aa, Enterococcus faecalis
MDAKQYVKNIQEKIHQLDQGQTEYLQAVDEFLPTVEGFLEKNPQYIEANVLGVLIEPERIFQFRVPWQDDQGNWHVNRGYRVQYNSAIGPYKGGLRFHPSVNLSVMKFLAFEQIFKNSLTGLPIGGGKGGSDFDPKGKSDAEVMRFCQSFMTELQKHIGPSTDVPAGDIGVGAREIGYLFGMYKRLRNYDAGVLTGKPLGYWGSQARTEATGYGTVYFVKHLLADKNDTFEGKKVAVSGSGNVAIYAMEKATELGATVITCSDSSGFVYDPEGIDVALVKELKEKNRERISKYVETRKGATYYDKESVWNFETAYDIALPCATQNEINEKQAAILVKNGVKVVAEGANMPCTLEAVAVFAKSAVIYCPGKAANAGGVAVSALEMSQNAERLAWSFEKVDGMLDQIMQNIYETCRDTANEYQARDNFVLGANIAGFEKVAAAMLSHGLV

SEQ ID NO: 3885 - protein, 267 aa, Enterococcus faecalis
SNVYFFLKSRKNPVIMVHYLLNWRRTMKNFDVIIVGAGTSGMMATIAAAEAGAQVLLIEKNRRVGKKLLMTGGGRCNVTNNRPAEEIISFIPGNGKFLYSAFSQFDSYDIMNFFESNGIHLKQEDHGRMFPVTDKSKSIVDALFNRINELGVTVFTKTQVTKLLRKDDQIIGVETELEKIYAPCVVLTTGGRTYPSTGATGDGYKLAKKMGHTISPLYPTESPIISEEPFILDKTLQGLSLQDVNLTVLNQKGKPLVNHQMDMLFTH

SEQ ID NO: 3886 - protein, 71 aa, Enterococcus faecalis
DFFAKLPTGYSHSTYYIFNIHKITKGIYTIMNIYSTVDNPTKKSMGQKSLWIFAPRSKTDKRREQKQLLRK

SEQ ID NO: 3887 - protein, 314 aa, Enterococcus faecalis
EIPLTENDLVFVTNGSITESSTQGDHHTPAPNTHELGRSLNLWKHLAKQSPEFGHPEVFCENLPDESWFVSATITWENFDIEPYLSRLTHRKLRTGKIVTGGIITIKDSNWMMSFAMHRQPHFKEQNDQQSITWVYGLLSNKPGNYIKKPIEQCTGQEITQELLYHLGFPEGEIERISEESATTIPVYMPFITSYFMLREPGDRPLVVPNGSKNLAFIGNFADTERDTVFTTEYSVRTAMEAVYQLLEVERGVPEVFASAYDLRVLANSVYYLSDKKKLTEMDMPFVERKMVEHFVKKFEDTYIGDILRENHLI

SEQ ID NO: 3888 - protein, 125 aa, Enterococcus faecalis
KKCGLIMKDNRITVTDIPNTNLKKITLKNDFLEVVLLNYGARLHQLLMPNKNNHWENILLSYDSYQDVLKDQSFFGATVGPVAGRIRNGHWQNGILEQNSDGHHIHGGSKGCLFNIGQSSSSPRN

SEQ ID NO: 3889 - protein, 231 aa, Enterococcus faecalis
FYRSERKKFMFKGVLFDLDGVITDTAEFHYHAWKKLGNEIGISIDRVFNEQLKGVSREDSLQLLLKYGKKEGTFSSEEFAQLAQRKNDYYLEMIQAITPEDVYPGILSLLTELREANIKIALASASKNGPFLLEKMQLTPLFDAIANPADVQAGKPAPDIFILAAKEIDLTPAECLGIEDAKAGIQAILASGAQPVGVGRKEELGEGLPIVPETSALTFDYLKKVWLDHEG

SEQ ID NO: 3890 - protein, 128 aa, Enterococcus faecalis
AAELGMEEKAVEMYQRTARLDLDNYNNDTEDGLHITSMTGSWLAIVQGFAQMKTDHQQLKFAPFLPATWTAYSFHINYRNRLLFVEVAADQVAFTLLDGPAIPLTVYDQKYTLKDRLVLPIRKEEVHV

SEQ ID NO: 3891 - protein, 179 aa, Enterococcus faecalis
RLEEQQTYRYNALKMNGFSELDIQMIMDSEKNPPIPYLEALKNSRGGYTTPPERSLVKYLVAKSSLPTSVINILINYVYNIQQQPTLKAEYVNRIANEWGQSGIHAPEKAIEHVRESAKQSQTKQKQRQQNYSGKRQTVRQERLPEWADQPNDETKLSPEEQAELDRQIQEFLNQGGDQ

SEQ ID NO: 3892 - protein, 311 aa, Enterococcus faecalis
PMMEDVGKEMSKIIQKRDINERYEELVNEVLKDQDVQAFIQANRERLTDEDIRKSYAKLYEFVQEKKKFQVNDPAMIAPGYEPRLMLNFHYIDVTYVPTADLIARQKEEEIRNRVRAMDMPKDVREANLRDFDPSSQGRAKALAEAMQFLREYPATPKEFHKGLYLQGPFGVGKSFLLGAMANALAERGFTTTIVHFPTFTVEMKQAIGRDQVGEKLDAVKKSPILMIDDIGAESMTSWIRDDVLSVILQYRMQEQLVTFFSSNLDLKALEEHLTVTQRGEQEPLKARRIMERVRYLSKEITMTGNDRRNG

SEQ ID NO: 3893 - protein, 472 aa, Enterococcus faecalis
GVFSLAKKINNEYNDASIQVLEGLEAVRKRPGMYIGSTDSRGLHHLVYEIVDNAVDEALSGYGNEINVTIQKDNSICVADSGRGMPTGMHASGIPTVEVIFTVLHAGGKFGQGGYKTSGGLHGVGASVVNALSKWLEVHIVRDGVEYMERFEDGGKPVGTLKKIGKTKKRNGTSVTFLPDDTIFSTTNFSYEILAERLRESAFLLKGVKITLTDERGEEPKEEVFHYEEGIKEFVAYLNEEKDTLTPVVYFSGAKEGIEVELAYQYNDGYSENVLSFVNNVRTKDGGTHEVGMKTSMTKAYNEYARKVGLLKEKDKNLEGSDFREGLAAVLSIRVPENLLQFEGQTKGKLGTPLARTVVDNVVGEQMGFYLQENSEMSQSLIRKAIKAREAREAARKAREESRNGKKRKKGESLLSGKLTPAQSRNPKKNELYLVEGDSAGGSAKQGRDRKFQAILPLRGKVINTEKAKMQD

SEQ ID NO: 3894 - protein, 446 aa, Enterococcus faecalis
KPLEEPPQNVIFILATTEPHKIPLTIISRTQRFDFKRISTQDIVDHMAHIMQEMALDYEEQALYVIGRAAEGGMRDALSILDQTISFSDEKVTLEDAMQVTGSLTYEMMDHYIQCCVAGDVERALEGLESILGEGKEARRFLEDLLLYCRDLLMYQQAPKLLAEKAGTLTEAFKELATQTPAEKIYQLIQILSDTQNEIRFTNNANIYLEVATVKLAKTVQPNKHNTPETANQDGSAEGNPELADLQNQIGQLKKELAELKKHGVAAKEADAPRQQARPQAPKSSFRVPTERVYQVLNEATRTHLMNVKNVWEDLLQTLSVTQRAMLKASEPVAASPKGIVVAFDYEIVCARATDDEEMQLAFNNNLSRLMDYTPEMVCITRESWPKLRQSFINQNQGSLNHSEPENEMARLADEPPVTNEHSQENPVVDEAIAMFGEELVEVLDD

SEQ ID NO: 3895 - protein, 109 aa, Enterococcus faecalis
  MISC_FEATURE (81)..(81): Amino acid 81 is Xaa wherein Xaa = any amino acid.
RSRGIMMRGMGNMQGMMKQVQKMQKEMAKAQEALNEKEFIGEATNQLVTATFTGDRTMKDLIIKEDVVDPEDVDMLQDLVXMAVHDALVKIEKETEATLSQYPKECQNP

SEQ ID NO: 3896 - protein, 156 aa, Enterococcus faecalis
ELDIFCFYPADFSFVCPTELGDMQEHYAHLQELNCEVYSVSEDSHYVHKAWADATETIGKIKYPMLADPNGQLARFFGVLDEASGMAYRASFIVSPEGDIKSYEINDMGIGRNAEELVRKLEASQFVAEHGDKVCPANWQPGEETIAPSLDLVGKI

SEQ ID NO: 3897 - protein, 329 aa, Enterococcus faecalis
NRENVLFSSFSETQKKEEKQVTEEIYDLIIIGGGSAALSAGIYAGRAMMDTLIIEKDKIGGQVTTTSEIVNYPAIRHTTGPELMEEMRIQAQDFGVAFTNDEIIDVDFSQTIKTVQSASQTYQAYAVLIATGASARKIGFPGESEFTGRGVAYCSTCDGEFFQGLDIFVIGGGYAAAEEAVYLTRYGKSVTMIIREPDFTCAKLTAEAAKNHPKIKIVYNIEVKEITGDDFVRKAVFVNNQTGEETVYEAPKDSTFGLFVFAGNKPSTEIFEGKIALDRGYVPTTENMETNIPGVYAAGDLRIKELRQIVTAVADGAIAATHAQRYVTE

SEQ ID NO: 3898 - protein, 218 aa, Enterococcus faecalis
KRGVYTMGKTLTGFHLKVIGVISMVFDHLLQFFSFLGVPGWFGWIGRIAAPIFLFESSEGFIHTSNRRKYMFRLLLGFWIMGILNGILNAYFSTGGLIINNIFGTLFLGTVYMQSMDYFKQKQIGKGLLWFIVPLLISALPLVVFSSPDILSNPAILIGFQIFNLIVPSLMMTEGGFLFVLLAVAFYLFHGKKWLQISAIGVVALISAASYNFQELFG

SEQ ID NO: 3899 - protein, 68 aa, Enterococcus faecalis
KATAKRTNKNPPSVIISDGTIRLKIWKPIKIAGLLNMSGELKTTRGRALINKGTINQRSPLPICFCLK

SEQ ID NO: 3900 - protein, 129 aa, Enterococcus faecalis
EKGVFLLKKWSLQQVVLLAFLAFLFGGVFMGAGFLYALLNAALLPLGLSPFANELLFGMWTMVAPIAAMLIPQAGSAVLAEVLAALAQMLYGSYFGPSVLISGVIQGLSNESGFLGDTLQAVRYTNVTL

SEQ ID NO: 3901 - protein, 75 aa, Enterococcus faecalis
VRYSKYSISKKTITPTLIPYNKKKLSAIILRMTAPSFNLLKIQLLIDYKLILHQTFQFNIWIFIRKPAFRKLVFK

SEQ ID NO: 3902 - protein, 496 aa, Enterococcus faecalis
LNNYYYLGAPSAKLEQSKGKKQGTLPNLTGWQIEKQRGISVTSSVMQFDYQDKRINILDTPGHEDFSKDTYRTLMAVDSAVMVIDSAKGIEAQTKKLFQVVKKRGIPIFTFINKLDRDGREPLELLEELEELLDIESYPMNWPIGMGKGLEGLYDIYNERVELYRPENNGGERFIPLKDGDIPSDLPLHNNSVYQQVLEDVELLVEAGDEFSEEKIARGDQTPVFFGSALTNFGVQTFLETFLQFAPAPHAHKTEEGGEVSPYEKEFSGFVFKIQANMNPAHRDRIAFVRICSGVFERGMDVTLGRTGKKVKLSNVTQFMADARENVTEAVAGDIIGVYDTGNYQIGDTLYEGKMNVQYEELPSFTPELFMKVTAKNVMKQKSFHKGIYQLVQEGAIQLYKTYLTEEYIIGAVGQLQFEVFQYRMSNEYNAEVVMTPMGSKIARWINPEDLDERMSSSRNILARDRFDQPLFLFENQFAERWFADKYPDVELKSLM

SEQ ID NO: 3903 - protein, 175 aa, Enterococcus faecalis
GGQIKMDLRDYIASIPDYPEKGIVFRDISPLMANGDAYREATKQIVDYAKEKRIDMVVGPEARGFIVGCPVAYELGVGFAPVRKKGKLPRETIEVTYDLEYGSDTLTLHKDAITPGQRVLICDDLLATGGTIKATIELVEQLGGIVVGCAFLIELMDLHGRDKIDGYDIVTLMEY

SEQ ID NO: 3904 - protein, 145 aa, Enterococcus faecalis
PDSFELLKELGVSECLLVEDFLATPVKALMKQRFAFAIDTTGGEITSAVLPQLRYDGRSAICGRAAGITLETTVLPFILRGVHLLGIDSVNVGMDKRKIVWQRLATDLDITEKAVYQEITLEELPPVFEALQAGQHIGRTIVRIS

SEQ ID NO: 3905 - protein, 262 aa, Enterococcus faecalis
GGVLIMDVLVTAGGTSEPIDNVRSITNHSSGGLGKAIAESFLAAGHTVTYVTTKHALRPTQQLDLSIKEIETTVELATTLEQLFAEKQFDAIVHAMAVSDFTTETAQTEEQFIDSFAQQLSEQTLPKTKEALVTIVQNTLNQIADIPQTATKISSDTDRLLIFLKKNPKVIQMIRDKQPQTVLVGFKLLVNVSQEELVQVAQAALVKNRCDFVLANDLMNVHETEHKGLLINETGIVQEAYSKQGIGSMIVKNVEKKWREQQ

SEQ ID NO: 3906 - protein, 555 aa, Enterococcus faecalis
NRARSQTARLLSNCPWLWLPFSGAKTMKKRLRIEYFLVAAVMLLLFVGSIAATNFFFQKEMVAQQETYLRRKNTLLTDQLPPSVFEKGQLTNQQQLLVTHALDDAEERVTLLQKNGTVFFDSSQNEPLESHKKRPEIAAVLSGATYGSALRKSKTLNKELLYVATPVLKSGEIVGIIRISEQTALFSKNIQSFRRYIIFTFGILFLLITLFIFLLLRQKNQPLVTVLPILKRMLKHPDENRSIIQQSSEWNELYETINLLSQQVSQTYKAYTSADEQFHELLDELMIGVFIIDTQGRLRLLNPKMQEMLGLSAKNMQSNYLEVIQDADLIHLIHQVVAEKNSLHQEITVTQGPTPLRLDLSLRYLDDQSANDYQVLGIAYDLTRVRQLEKMQKDFVSNVSHELKTPVTSLLGFTETLIDGAKEDPEVLNQFLHIMQKDAQRLQQLIQEILELSRGSATIPYAEQEITLEKFITEILGSYQQQLAAKQLKTVVHGLPESQFFTKYELFYPIVKNLIENAIQYSQENGQITISYARANPQLRLSYQDIGMVLITTPP

SEQ ID NO: 3907 - protein, 130 aa, Enterococcus faecalis
WGHPVVKTVIFRRLKPTTTETLQEDTPKAPLVIGEIRVDEQNYEVFVRNQPIELTPKEFELLVYFMKRKDRVINRETLLERIWQYDFAGQSRIVDVHISHLRDKIEPDPKRPVYLVTVRGFGYRFQEPKR

SEQ ID NO: 3908 - protein, 446 aa, Enterococcus faecalis
YQPRSSSSGYEKDRKFSPNIHLLMTLAAVGSALMGSFEESALLILIFAAAHFLEDYAQGKSQREITKLLNLNPTEARLITDDGSIQTVSVEQLKIGDRVQVLNGAQIPTDGVVIEGSTAVDESSINGESIPKEKNSGDPVFGSTMNGSGTIVVEVTKDSSETVFAKIVQLVNQSQENQSEIASKIKRFEPKYVTLVLAVFPLIVLGGALLFQLTWAESFYRGLVFLIAASPCALAASAVPATLSGISNLAKQGVLFKGGSFLSNLAEVKALAFDKTGTLTKGKPEVTDYLFVDGLEDRQEELVAVLTNMEKKSNHPLATAIVNRFEAETTALNLEVENIVGVGLVTTIAETTFRIGKPSSFEQVPTIIEKQTTKLASEGKTVVYFAENEQVIGLVALMDVPNEEAMNAIHYFKSQNIETTMITGDAKLTGEAVGRLVGVDQVFANV

SEQ ID NO: 3909 - protein, 77 aa, Enterococcus faecalis
IAGQYHHHIGTNTWSGKQLPTIQENQFGLENYTFRLPTAADLEIVQANAEEAKLHFIAKDHLLALEDPSGMIIQFTY

SEQ ID NO: 3910 - protein, 255 aa, Enterococcus faecalis
GSMLIEERLAKIQKIVNEQKSISMEALAEQVSVSKDTIRRDLIRLEKEGHLKRTHGGAISVQSEATIYDYAQRIVKHPEKKQAIAQKVWANIPKQASIFFDSSTTVEAAIRAMENSPIHAITNSLSHALLLAQMDQTKITVLPGQLHKQQLFLFGAETVAKVGEFAPDYTLLGVFALSEQGLFIHTEEEGQVKRRMIQQGKQVIALADQTKLNKTGLFKICELTEIDCLVTDTRPDEKFCEQLAQAGVTLIVADE

SEQ ID NO: 3911 - protein, 92 aa, Enterococcus faecalis
WRIIMKRKINYTHIAEPTVFENVFPTYLTNETMMARKQKVLQRMETEKFDQLVFYADKEHGSNFEYLTGFIPRFEEGLLVLNNDLHHKLSPH

SEQ ID NO: 3912 - protein, 287 aa, Enterococcus faecalis
IVVKKIFLYTKSSEIKEKKGASDVVKKIGLSIMLLFFFLIIALPIYAWKIDPNLVHVNQVTLGKKNQREPLNVVQLSDIQVSEFYETKRLDKVIKKVNREKPDIIVFTGDLFDNYAKNPQQKEPMIEKLKQLQATIGKYAVWGNHDYGGGAFAVYDEVMEASGFTVMKNQGETVTLADGRRLFIGGLDDSLLGNPSVSETLSYRETYDYALLMTHEPDVADAFVGTGTQLVLAGHSHGGQIWIPFYPITNVLAEKYTRGLYQLDQETQLYVNTGLGTTASIHHELPH

SEQ ID NO: 3913 - protein, 205 aa, Enterococcus faecalis
EQAGNYKDLTGQKFGELTVVAPTAKRKEGLIVWACRCSCGSYAEASRRQLIRGYRTKCAHHRYQTMLKKNYHELVVVRIESIQQTMKAYCLCSCGQSCWVRCENLLNGHTKSCGHRKKKDYRQRVAGVIPGKLQSKRPKNNSSGHKGVSQTASGKWLAYISLKGKRHNLGIFTKKSEAILARKLAERRLFQPILQQEIVTINKED

SEQ ID NO: 3914 - protein, 220 aa, Enterococcus faecalis
  MISC_FEATURE (216)..(216): Amino acid 216 is Xaa wherein Xaa = any amino acid.
GGLNFVVGDGLYEFIDHMNSVIPFFEKRITVETKEKLKLICYRWDRLYFSVAAFIPAKQSSFFEERFPQIHRALDGFIQKTESLYQKRFLMYERVHLYYDFMFCLLNDRSFCAIEKTIHVFVDFSGGEDYNRFIAKIIASFNYMDVMIDHKLTLETDLYLSDFYSSKVRCRQLTWRHLPETKDWQVFAEVVRELRKGETQKNEHYERDPIEMWREXEYEG

SEQ ID NO: 3915 - protein, 297 aa, Enterococcus faecalis
FFQRMEFFCMKTLIKNVHILTMDEQFSEIKAGYLVIEEDTIVELAPMTTLDEKRMAANQVIDGQNGILMPGMINTHTHVGMIPFRSLGDDVPDRLRRFLFPLEQFMTKELVGCSSDYAIAEMLLSGITSFCDMYYFEDEIAKSCEKMSVRALLGETIIDMPTCDSPEPSGGLFYAETFIRKWQGHPLITPMLAPHAPNTNSPEVLAKIIELSRQYQVPVTMHVAEMTYEMAEFEKAYQKTPIAFLEELGYLSEPFILAHCILATDEDLASLAATNGKARVAHCIGANTKSAKGVAPN

SEQ ID NO: 3916 - protein, 84 aa, Enterococcus faecalis
SLSMGGILSQAPIEQLGASLQKVRQAMQALGYQNMNEIMSFSTLSLPVSPAIKVTDFGMMDTKSQRFYPLVFPEDGVLLHENTH

SEQ ID NO: 3917 - protein, 65 aa, Enterococcus faecalis
KEVVSMRNFKYLFEVIFVIAAVLATTLIYGPIVNRLLFLGLCAIAFLYATDKVLEKVLKVKIIHF

SEQ ID NO: 3918 - protein, 90 aa, Enterococcus faecalis
ITKRREVMIEELLLFVEKFVERMKRQKKAFSISDIEKSYNLERKKLGKSAVKLTNMDRLTIESQLLKYQILQRTYKMTGYHKPCQVVFFS

SEQ ID NO: 3919 - protein, 113 aa, Enterococcus faecalis
KKEIILANRIQEIALTEKNLGSKIKAIYKTERDIYVNGAPVRGRVFTASSEKQRDFEIFVPHLRNSQMLNGREEVKLIDPVARINVKRNNIGNSRSIDMVVYAKRVEVVGGNK

SEQ ID NO: 3920 - protein, 155 aa, Enterococcus faecalis
LTFLNYLCYYLIKKIGYTIILLCKQKGGCKLKEFTIIREKNADKKTQAAQEVLFNLPEWFGLEKETRKYIDIASTLPMWVAKDVENKILGFITLSETSKDTVEIHCMAVKKRYHRKGIGKLLIESVETYSKNNYFFIQVKTVDEGSHIRLHTGVW

SEQ ID NO: 3921 - protein, 67 aa, Enterococcus faecalis
VLVVLGNVLDQKHLSRKKDQHLPMLATAYKCSDNPYTHAPHRLNTFSLTEKNKERADLARKGVVLRK

SEQ ID NO: 3922 - protein, 209 aa, Enterococcus faecalis
VYEERAYMDYLNTYKRLLALADAGLFYGKDAFDQERYQELRELTLQLISATGHEATVLPDLEKILTKEEGYPTPKVDVRGLIKKENRFLLVEDLRTKEWSLPGGYAEIGCSPKENIEKEVLEETGLVVTAKELLAVYDTDKRKDIPQLFQYYKMIFSCDILENHPFEKNIETSNCAYFSLDNLPSLSIKRTTKEQLMALMNQTTGALSD

SEQ ID NO: 3923 - protein, 133 aa, Enterococcus faecalis
TEQKLAYRGTQGTSGLYLFGWKIGSTGVTKESAKLNGLDVEATVFEDNYRPEFMPTTEKVLMELVYEKGTQRIVGGQLMSKYDITQSANTLSLAVQNKMTVEDLAISDFFFQPHFDRPWNYLNLLAQAALENM

SEQ ID NO: 3924 - protein, 62 aa, Enterococcus faecalis
  MISC_FEATURE (38)..(38): Amino acid 38 is Xaa wherein Xaa = any amino acid.
DLNPLGKGGVKEQNPGNVKRIIHRTPCTWEIKPSIMLXSNGVSYNKLIKIHYRHLQSQPVSP

SEQ ID NO: 3925 - protein, 257 aa, Enterococcus faecalis
VRRIGVENMLEVQNLKKVYGNEIKYEALKGINLTVQDGEFIGIMGPSGSGKSTLLNLLATIDSPTDGEILLNGKNPNNLNQEQIAKFRRTELGFVFQSFNLMPTLTVEENIILPLTLDGEKVSVMKRQLAELSERLGINHLLKKRIAEISGGQAQRVAVARAMIHHPQLLLADEPTGNLDTKSSKDVMGLLQQLNEEEAATILMVTHDPLAASYCKRIVFIKDGELIDEIVQNGNQKEFYEFIMVKLAEIEGVDNEF

SEQ ID NO: 3926 - protein, 251 aa, Enterococcus faecalis
SSFSGKIERNSAVGRERIMRRKSVLYLEVADQIKEDILSGKYPVGTFLPTETELEELFNVSKITIRRAIEMLATEEFVEKKSGRGTTVLSNRPYNKLSKAGTFTEFLNESGQKVTKKVLQVENLTLSKEMPAYQFLGEEVVHLSRLYLIDEQPYIYFNYYLPAAMKDVSLTEYKEESLYRLMDRHAIEIYKFEDRFEVATLTEAEQKMLQTTETTGLKRIRRSLSPTGRCVEYSEAIYNTKIHPYVIEYEA

SEQ ID NO: 3927 - protein, 322 aa, Enterococcus faecalis
KVSKSDTDGGKNEKIRTFKSGIFFLRTHPQFNLNQLMKSFGISKSTALRDIEALENLGVPLYVENGRYGGYRVLNKPLLPPIYFNENEVLAIFFSLQLLKLVAESPFGHSYQQIKQKLLHSLDEPTQFKISQMSKVVYYEGIEQVEAPGNLEQLFHCILAQQVIQFNYTRYEATTKKILPTRLTILEGYWYCSGYDVTKKAWRTYRCDFMEAIQQLNQTLDFTTEELKESYRHQQTTARTIPFKAIITEKGKEFFYKHRFDNIQLEETPTQCFLVGQIHPTETQFLANYFMGFGEEVTILDPVQVKQAYVESIMRIQKKYQE

SEQ ID NO: 3928 - protein, 97 aa, Enterococcus faecalis
KSLILWTKPSSILIATIQNILESIISDNYFATQQFLQQVDAAAVYANASTRFTDGFEFGFGAEIGISTQKLHARGPMGLAELTSTKYVIYGNGQARS

SEQ ID NO: 3929 - protein, 92 aa, Enterococcus faecalis
PSVCNAAETLLIHQELAEAFLPTIEKPLKEFHVELRADERALAIFEEAIPATEQDWETEFLDFILAVKVVDSLDEAIQHINRYNTKHSGKYY

SEQ ID NO: 3930 - protein, 298 aa, Enterococcus faecalis
  MISC_FEATURE (18)..(18): Amino acid 18 is Xaa wherein Xaa = any amino acid.
RPKESLTIFKRFTKSMGXSGRMHYNEFKTAVLNATTGEVNVYDSQKAPSFVDAPITSSAANSLNEFFGRYSQGWWNQTMFGAKKDVKIPTENGIYASGQITPMMNKEGNQLLYFTDFTSSEKDQDSALGYSLINARTGQVTYYRDTKVGIMDSDGAISIASKIYPEKKWKASMPVLYNIDGVPTWIVSLMDSKGIFKKYVYINAVDNDIVIDADTAQGALDAYRIELVTKGSNNENTDKANLKTMQGKVARVSVVAGEAQTVVSFLLEDEKTIFSVTTNNSPLALFLKEPTKVTTTGE

SEQ ID NO: 3931 - protein, 115 aa, Enterococcus faecalis
TDDMRVPDSEVETDLRVSFSPIEVEEENYPENSSALVARLEFRIVFDEFVLSGAISQINHIIDRKIEKQEDISQEEVDELVRPLFSIVERLSYEVTEIALDRPGVQLNFQQSEEA

SEQ ID NO: 3932 - protein, 122 aa, Enterococcus faecalis
RGILSSRRCKRMQKICWILSVNRDGATLFVGSPANGGPWLFSNKEQQNIKAFFQPTYEIDFISYDVLSEEVPEAAFILYNEMLAPYLPEKITKVGQPIAYVDIATKNYEQFKKALVAKSSQE

SEQ ID NO: 3933 - protein, 227 aa, Enterococcus faecalis
GGTKMTTFITVLVILAFIAVLFGFYQMQKKHLKFSTRVFSALGVGIVLGAIIQFAFGTDSKITTQSMEWIGIVGNGYVAFLQMLVIPLVFVSIVGAFTKMKESNKLGKISFNVLATLLGTTAVAALVGIGTTLAFGLQGAKFTQGAAETSRIAELATRQDAIQDLTIPQQIVSFIPKNVFADFAGTRPMNTIGVVISAASVGVAYLSVRRTAPQEAEYFANLIESLY

SEQ ID NO: 3934 - protein, 73 aa, Enterococcus faecalis
ETFKVKGTNEYKLWSLIGGKASSIYGTLSGGILSRVGWTPINEGQLIQSVHFFLNFKRILFYKYLRSGKMMDE

SEQ ID NO: 3935 - protein, 228 aa, Enterococcus faecalis
RSVRMFENESLSFEEQTIIQAAERYVQQELANEASGHDWWHIYRVTQLAKTIAEKEQANLFLCILTALLHDIGDEKFNESEEAGLLKVQQWLEANNVSTEQTNHILSIIANMSFKGGNTGKTVTTLEGKVVQDADRLDAIGAIGIARVMAYSGNKGRLIHDPHKQPREQLTQEEYRNGEDTAIMHFYEKLLKLKEQMNTNYGRLLAEKRHQFMELYLEEFYQEWDGHR

SEQ ID NO: 3936 - protein, 174 aa, Enterococcus faecalis
KEAAMNNYQWYTEQWGKPTREDDLLFLLLTVGVFQVGLSWKAAAGKKVAFMKNFCQMKPEKVAALLPDEVDRIVADPDMIRNRRKIEATIKNAQAILKVQEEFGSFANYLWQFVKNVPVLSIYEEAYQVPRTQLLSDNVAKDLKKRGFSFVGPIVTNMFLKASGIIQVEILNPE

SEQ ID NO: 3937 - protein, 83 aa, Enterococcus faecalis
  MISC_FEATURE (33)..(42): Amino acids 33, 35, 36 & 42 are Xaa wherein Xaa = any amino acid.
LRTKENAHPEIEIWGEASRLFSMVAVTYLMGLXTXXSKSRFXKLIKMIFLSPFEILRKLNEFGSHLMTKTMDVCRSIYQLTEI

SEQ ID NO: 3938 - protein, 92 aa, Enterococcus faecalis
LPFSGTLYFNCSRKRNIRGRGENMFELDLEMIAKLRERRARKNITLEKASHEIGISSKTLGQIENEKILSVRKTVYKKLVDWLVNEKIYKEA

SEQ ID NO: 3939 - protein, 115 aa, Enterococcus faecalis
TKKFIRRHDSMTMEQLKTPPIVVEVSHTLSKEQFNAIRQEAYLATMEGIEKARKDSELDSDLIYTRVGVRRFLDNCSEAYLDELIAKGLPTGRRLSDRKTCWSKRQMTAWLLENE

SEQ ID NO: 3940 - protein, 137 aa, Enterococcus faecalis
PLGFSKMNNKNHHADRESRAKHIFNCQSQKSIVRYYRINFRRQIIMNENLKEVVNKILEFEPDTPLESIKQEIGQLADAILFPEQSTVKSVLQEMYEINQAEGITTDGKPITVADYQDLIYQYIEQLSDLLGIELED

SEQ ID NO: 3941 - protein, 224 aa, Enterococcus faecalis
KMEELVFLRSQYIEEEPFTTSKIIAEYAEIEHRAVRQLIRTYEKDLNEFGKTTFEMSKINKGRGRKQKIYHLNEEQATLLITYLDNTEPVRRFKKALVRQFYDMKNGLYARRMERQKEKSVRKSMTDVIKELGLSPHYYKHYTDLVYKTALGFNAKQLTEARQVSKKSTTLDFLTSEEIEAVNKREQQVATLLTLKMDYDTMKSILSGQRVLYQTTLKMPAATN

SEQ ID NO: 3942 - protein, 120 aa, Enterococcus faecalis
GHLDNLVKGGRISRTTGLLSNIFNMKVVMDFENTELIPVAKGRGVKTFNKWFDELKSELSKIPNVRQIGISHADGLELANGFKEGLQAIFKDMDIPVLHTNPVIATHTGKNAFAIMYYTD

SEQ ID NO: 3943 - protein, 304 aa, Enterococcus faecalis
KEVTKMKKQTQHILLTVLTPILIALGVFTLLSVAIPKAKPLLKQEKVATTAQKNQKEVIHYTAIGDSLTEGIGDLTNSGGFVPIVADDLKEHYNLNGVQTDNFGKNGDRSDQILKRIKEKPEIQKGLASADVITLTVGGNDLMKVISSNIFDLKVSSFNRPQKAYQRRVRRLLEEIREYNEKAPIYVLGIYNPFYLNFSEITEMQEIVDNWNQATEEMVQEQKRAYFIPINDLLYKGRGDEVGVTGGDSETTGSSASKEDLNNLLYEEDRFHPNNLGYQIMAGAVRDEMVKTEKEWITKSEGSE

SEQ ID NO: 3944 - protein, 204 aa, Enterococcus faecalis
PNQKVVNKMNEEKPKTSKSIKKTQPTNLKRNPWKIAFLVLVGLIIGSVAFVTFRATQVREPDLKKIPAIVEKEGEPVVTIQSKKQQVNKLIDFYLADFQKGSEIKYKFYLENDALLNGTFQVLGHDIPFYLYFDPYVMANGNVQLKAKSLSIGTLGLPIKEVLKFAKRSYKLPKWVEINPDDQTVLLRSDQFRMQTVLSSTRVG

SEQ ID NO: 3945 - protein, 193 aa, Enterococcus faecalis
AHPRAEHYSANMPNDNIARAIKKASSAGEGEHYDEVTYEGYGPGGVAVLVHALTDNRNRTATNVRVAFTRNGGSLGETGSVNYMFDRKGYIVIKREDHAIEEDDMLEVVLEAGGEDIETSPEVFEIYTAPEDFTAVRDALEQAGYSLAQAELTMVPQTLLTLNDEQKAQLERLVDKLEDDDDVSEVFTSAENL

SEQ ID NO: 3946 - protein, 162 aa, Enterococcus faecalis
NESGYRMEGILKKRICLQAIREEAEAYYRNGDFYCSEAIVATIRQHFDAEIPIEAVAMASGFPVGVGGAKCICGALSGGVMCLGYFFGRTEAKGEQVNKTMALANELHQSFRQKHRVVCCSILTSKMTMGSPEHMEQCIGFTGEIAETTAKIIARELAYELV

SEQ ID NO: 3947 - protein, 279 aa, Enterococcus faecalis
TAWTRSSNLRVSSRNAKLFDGGNSMEKNYTIKDVSELLNIPKSTIRYWDEQGLISTTRNEENGYRTFDLEDLFKIYDIDFYRKMGIPIKDMLNLYKKTPTDLYATMEATEEQLGQEIKRLQHKYKEIKKRKLHLHALIDLETLVFSDEPIPFDKIVVVDIEDPEEMKVYMEHISTLGIYGDLSESNELTYGICLANHVNKKSLDKVIWLKESSSQYKGFILKVNTQDTRLNNIEEVKKRLAKQGFETGIVVGEHILTQLEEENQYIEYYYGWIEILGEK

SEQ ID NO: 3948 - protein, 60 aa, Enterococcus faecalis
FLKQFRTNVIKGKTIKKLLLKLELTYVCNFLGKVNIFASYKTCYLIHDFLLKYRVFSFFS

SEQ ID NO: 3949 - protein, 201 aa, Enterococcus faecalis
MNKAVKNFVSYLMITMLFILNLLPMMNAFAQEVTSDAEKTVEKDGLKVIGKIEDTSSQEDIKTVTYEVTNTRDVPIKDLILKQKNTNDSPIKFVLDTLSEERGPTSLEEQAKVETNEKDQTTDIKLLNLQPNSTRKITINGQITTKASNKLLVSVLIEDNEKGTLVIDLPSKDILADKESVSKEKQETSETKVENQANETA

SEQ ID NO: 3950 - protein, 436 aa, Enterococcus faecalis
FRGEELLAGDLRLGSLTSFIPSPVITGFTSGIAIIIALGQLDNFFGVRSEGHNLIEKISSYRSLGFDLSIPTTVMSILVVLGLVFFPKKWNAMIPASLVMIILATLATVVFQLPVATVGKIPTSIFSDTRLELGSLQLSAFQDILVPSISIAMLGMIESLLCGASAGRMTGKPLDSNQELVAQGIGNLILPFFGGVPATAAIARTSVVIKSGAQTRLAGIFHAVFLLLSMLLLSPVMSKIPMPALAGVLVVTAWRMNEWSVIKEFFQKRFHTALCLFFLTMVATVIFDLSLAIVLGVLAGCLFFIAKSAVITINVEEVDWSRMGLVPTDCTENWVVVYLSGPLFFMSSERLKQTLLQLETKSGVVFSMRGVPSIDSTALDILEEFCLAAEGRGQQVQFAALQPEVEKMIRTIQGNQEKEYHFSVAEFLQTVHVAEQ

SEQ ID NO: 3951 - protein, 425 aa, Enterococcus faecalis
  MISC_FEATURE (8)..(8): Amino acid 8 is Xaa wherein Xaa = any amino acid.
IEFFTISXGFTGGKMFEEQRGGVVAAIATVGVIVSTDVPQLFGDMFIGPLAGYTFAKIEQILLPKVKEGYEMLTKNFLAGIVGGLLCCFGILVVAPAVESASFWLYQFSSWLIEANLLPLVHVFLEPLKVLFFNNAINHGLLTPLGLEGASQTGQSILFLLETNPGPGVGVLVAFLLFGPVGQRKTAGGATMIQLIGGIHEIYFPFVLMDPRLFLAVIAGGMSGTLVFQIFNVGLSAPASPGSLVAILANAPTDARLAVFSGIFVSFLCSFAIASLLLKRQRGIEPVSMIKMKEEDQVETVTPNYQQILFVCDAGMGSSAMGASLLSRQLKAVNLEMPVTYQSVHQMKWQPKTLVVIQAELKQLAQKYVPEKDMVSVQNFLEIKSYYPQVLAKLTASSQEQSSLGSESTETNSTKQIQKLVFLYA

SEQ ID NO: 3952 - protein, 213 aa, Enterococcus faecalis
SYPWAGLNYKGETYMKSIKTILLGTTLAAGLGLFLGTDANAESLYTVKAGDTLSTISHQFAGDNSLIQKIASDNKLPNLDLIFEGEQLVIRSEKEVANTPAPAVEVAPVQQVVEQPVAQPVQQEVQQPVAQEVAQPAAPAASSDAKEWIAQRESSGSYDATNGQYIGRYQLSASYLNGDYSPANQERVADQYVAGRYGSWDAAKSFWLANGWY

SEQ ID NO: 3953 - protein, 128 aa, Enterococcus faecalis
KGLITIHLLEYLGITIQQVSAEKCQLTLTVKDVHKQPYGLVHGGLNGVLIETACSLGANENVPENTFAVGIDLQVNHLRSVHDGSLTVIATPDHSGKTLQVWEAKIYNADHQLTSVGRCTLTNRQKKQ

SEQ ID NO: 3954 - protein, 126 aa, Enterococcus faecalis
NSSDFFSKVPILVYNRKDEINEGGFLMRNWTTIKEYDEILFEQAGKVAKITINRPHVHNAFTPKTVMEMIDAFNISRDKEDVGVIILTGAGEQAFCSGGDQKVRGNGGYVGENNIPRFKCVRFTTG

SEQ ID NO: 3955 - protein, 62 aa, Enterococcus faecalis
IYNGLIRVIPKPVIAMVKGWSIGGRQCYTISLLILTMAGDNANLGQTRPNVRNFDGGYGHVT

SEQ ID NO: 3956 - protein, 218 aa, Enterococcus faecalis
TSFKKKNSGEHSYLLFTTYRKGVNNLNRKKQRFLFFPILLILLALVPSNGFASEFNFAVTPIPSEKQVDKEKTYFDLLLAPNEETELKVNLRNDTDKEVKVGISINSAITNSNVIVEYGENKGKKDQSLAFDIKDYVQYPSSVRLKPKSEQTVSINVKMPNTPFDGVLASGITFKEETSDEGKRQDDKSQGLSIKNEYSYVVALLMQQNSLTPRDGPH

SEQ ID NO: 3957 - protein, 215 aa, Enterococcus faecalis
TSNGIVELTPSEEPIIRVTPTDPTNPVDPIDPTDPERPNPGTNGPLSIDYASSLDFGVQKITSKDQTYFAATQKYKTVGATDEVKEGPNYVQVTDNRGTEAGWSLKVKQEGQFKSTSGKELTGAAITFKNGNVVTASDSGKPTGPATITLNSDGSQSDVMSAAKGNGAGTYLFDWGTDATTAAKSIELTVPGSTTKYAEKYATKLTWTLTDAPGN

SEQ ID NO: 3958 - protein, 79 aa, Enterococcus faecalis
TKKTTTTVVCGGNEGCYLLLVGVSMKKPIRDNWHNVSIVVCAFFIMSFSYIFYKTFIRTPLTVLYLDYLKRFLLLNILF

SEQ ID NO: 3959 - protein, 129 aa, Enterococcus faecalis
FKISKRKTQGGLEMTLISRIKQLAQSKQITFAQLERNVGISNGQIRRWDTSSPKVENLLKIADYFSVSLDYLMGRTQQTEINHQAPMKSTQKELHIHITTEELTEEEITQLEEEANRFLRFRKFEMTNS

SEQ ID NO: 3960 - protein, 75 aa, Enterococcus faecalis
KSVVKRLYFQNDFGDTALIEAVGLREGNQLYQDIVKLLMENGADQSIKDNSGRTAMDYANQKGYTEISKILAQYN

SEQ ID NO: 3961 - protein, 411 aa, Enterococcus faecalis
IQVGVKESMNYWLKNVRIETEYQKEGDWLSGTVTKEVAIEITDGVFTKIIPNEELVEEPGLTIIDGHHQLILPGLIEKHCHFDKSKLGVPWYPVTPAKSIVERVEAEIPYLDSLELSLTERANHLIDLELPHGATAFRTHVDVEPMTDLRYFDEVQALAQTKPFAVEIVVFPQHGLLRSDSVELVDQALAKGADFIGGVDPYSLDGDYKKSLAETFRLADKHGVGVDIHLHDRHEAGTTTIKEIIRLTKEYGLQDKVFISHAFGLNDFIGEERAEVYDALAAEKIHINSSVPITPNTIPPIMELLRHGVNVHLGCDNIYDCWSPYGDGSLQEKLARLGELFNVKDQDALTQLLGLVTDGVTTLDEQGQVNWPQVDAEATYLLTEAECAAAFVARQTPVEISVVKGTTLYQK

SEQ ID NO: 3962 - protein, 375 aa, Enterococcus faecalis
FLKHKMNMISYYNWIDNYLLFEPFLIKPVFISVEPIFSKETREKIGYIQAFYELSSFYEIRNHLLLTLVVLEVISLIVSSVLGFILSSYFLKPLKVLRDTMDTIRKDPQSDVHMPEINTRDELADISEIFNEMLDRMRRYIEQQEQFVEDVSHELRTPVAIMEGHLNLLNRWGKDDPEILDESLKASLQEISRMKSLVQEMLDLSRAEQVDTQYANERTDAKQVVYQVFNNFQLVYPEFHITLDDDLPTEVELKIYRNHFEQLLIILLDNAIKYSTDRKEVHISISRTMNEFEIAVQDFGEGITEEDLEKIFDRFYRVDKARARNKGGNGLGLSIAKQLVENYKGRIDAESVLHQGTIFRIFIPIAGIKEESNVQ

SEQ ID NO: 3963 - protein, 82 aa, Enterococcus faecalis
  MISC_FEATURE (14)..(14): Amino acid 14 is Xaa wherein Xaa = any amino acid.
KVCFMEMDSFIFEXDNPELYLSVYDTNQKLVFKTQNEYDKLLQLDRQLPVVRTVFDKTGFYFRGTYFFKRNTRKDWLYSSVL

SEQ ID NO: 3964 - protein, 178 aa, Enterococcus faecalis
PLPVVRLLSIASERAGQDITKDNGKAAFEAMKELKPNVVKTYSKSSDLANMFQSGEIEAAVVADFAVDIIQGAAENVTYIVPESGTYANYNTVNIPKKAQNKETAFKFVNARISEESQKAKAISLNEGPTNQQVTLSEKEAKNKTYGAIAERAKTVDFNFINSQLADWIDQWNRTMNQ

SEQ ID NO: 3965 - protein, 158 aa, Enterococcus faecalis
SMESDDESIVLEKRDKMNVDVLLKNVWLYQTVTQTFVQRNVAIKNDKFYYIYEEENVNLQPQKTINAENQWMIPGLIDAHMHIESSMTTPTIFSKAVVRYGVTTVIADAHEMANVFGLEGLKAFMAAETELDIFHAIPSSVPSTTPELETTGGIIGLA

SEQ ID NO: 3966 - protein, 281 aa, Enterococcus faecalis
VAELLKEPKVICLGEAMNFKGISYEPDSLIRQIIDLCQKQRPTMPLEGHCPKIEDQELADFLYSGITSDHTHQFPKTLKEKIEAGVFIQFQNKSITPENIQVIVDNDFYNYASIITDDVMADDLLKGHLNANVKKAVHAGLPIEKAIYMATYTPAKRMGLHDRGEIAPGKKADFLLLNDLESFDINTVYKSGKVVFEKGEPFHYPEKIEEFPATYQQTIQCKKLTEEDLLLKVATTKETVRCNVIQKQEIGTFTERITKEIPVENGLLQWQKANCASLILM

SEQ ID NO: 3967 - protein, 323 aa, Enterococcus faecalis
RPYKTNPSMNGMVASVIYLMVCTPVTKGTINLNYLGTNGLFVAIIIGLLVVEVNRVFEVKNIKLKLPDTVPPMVATFINTLVPLLTNIILFYGINLIFLATTKKIFPETVMQVLTPATNIAGSLGGFLLIVTLGNILWLFGINGSSIIFPIVFTLGMAQTGLNAEQMANKEAMTHLMNLQMFRISVLGGAGGTLGLVLLMIRSKVSEYRTIGKLSLIPGICSINEPVIFGLPIVFNPILAIPFLLTPIVSLLLTYIAQSVGLISVGFIIDPSFTPFFAQAYLSSMDWRNIVFCFVLILISAAIYYPFFKVMENNKTKLIDEEL

SEQ ID NO: 3968 - protein, 128 aa, Enterococcus faecalis
IAALIRINTKQKTIFRQSILERYACAKNGVKDGSMINPTLISPTLCAIYVNNNETIGVSKNGIAKMGLKTIGSPNMTGSLIEHIPGIRESFPIVRYSETLLRIIKSTKPRVPPAPPKTDIRNICRFIR

SEQ ID NO: 3969 - protein, 61 aa, Enterococcus faecalis
MKWLLGLLIIFAIIGVVFSFYIANYFLKIALLKDNPWYHKKGHRLLNPDNFQERETRYTKI

SEQ ID NO: 3970 - protein, 268 aa, Enterococcus faecalis
EQQKQEGEAFWTESFAEDRWLKIKDETLYARCFIPYPDNHRWAICVHGYRSNGKRDMAYTALRFAKKGYNVLVPDLRAHGKSSGNKIGMGWLDRLDLLSWLSEVLAIDMEAEIILVGGSMGAATVMMASGEKLPTNVRGLIVDCGYTSVYDEFKYVLHESFHLPAFPILTIANQLALNNYGFQLKTASSVRQLHKNTLPTFFIHGTGDRFVPMTMFEENLAATQGIKKGLIVAKAPHLSSSVYEPENYYSSIFEFLEENCPAVKTISD

SEQ ID NO: 3971 - protein, 159 aa, Enterococcus faecalis
  MISC_FEATURE (1)..(2): Amino acids 1 & 2 are Xaa wherein Xaa = any amino acid.
XXVHPRGQDYGLYMALFDVPFTIKNTFIGRLLFPKAFMNAGSANLIFYLISFFGFLWSIFIFAYLLNKTRLKLLNKTFPYLLEILEVCILPLVILFAYIYIYLRVHGEGFSYIRESLLQQELTYSMKWFLCLGSLAPLFFFLSTLNLTKRVRQKKDMES

SEQ ID NO: 3972 - protein, 199 aa, Enterococcus faecalis
RKSGKVFLFMKVLLIIPAYNEEENILRTIASIETFKQEVTHFQHELDYVVINDGSTDGTKQILEANQINAIHLVLNLGIGGAVQTGYKYALENEYDVAVQFDGDGQHDINSLPILLEPLAEGKCDFSIGSRFIPGNEASFQSTKMRRFGIRLLSFCIRMASGKTIYDVTSGYRAGNRKVIAFFAKRYPTNYPEPESIVH

SEQ ID NO: 3973 - protein, 311 aa, Enterococcus faecalis
FFLTCEITVERRWQSTKVNFALHFFQERAKKMILITGGNGQLGTELRHLLDEQGIEYVSTDSTELDITDADSTLAKVKEIQPSVIYHCAAYTAVDKAEDEGKELDEKVNVDGTRHVAEAAKAVGATLVYVSTDYIFDGTKKEGVYAIDDQPNPLNEYGRTKLLGEQAVQEILDDYYIIRTSWVFGQYGHNFVFTMQKLAETRDQLKVVDDQFGRPTWTRTLAEFMAFVIAEKAPFGVYHLSNENSCSWYQFAKEILKDTEVEVLPVDSTQFPQKAQRPQYSVMDLSKTEALGFKIPTWQEALAQMLENVQQ

SEQ ID NO: 3974 - protein, 255 aa, Enterococcus faecalis
QRSFLDGHQFDVEAGTVLLIHYHDLHRIIKQSTDDFERMYIFLTPDFLQQRSSKRTNLSACFQHFGQRRSKVIKVDVAKLANYLTPLDHSPLPEEYGADVRYEQQLLDFLIYLNQLVLKEENESQPKQMIENERIEAMITYISQNLDQPLTLEQMEKNFFVTKYYVTREFKKHTGFTFHQFVLKKKLLYAKQLLKEYRSASDVYLKCGFKSYPHFLKSFKKEFNMTPKEFLVQHKNNQIIHFDHYEESIKKVRLE

SEQ ID NO: 3975 - protein, 282 aa, Enterococcus faecalis
GLSKMLTLAVRAHDVGTKISPVELAKKIAETNITSIQFALGISYPEYASAAVLSPGLGSQLKNIFEDEKITISVLSCYINLIHPDLEEREKRLHQFETYIRYDSMFGAKIVATETGSIYETIYYTEDNYTEEAYEEVLFAVRRLCREAEKYGIIVGIEPGINHPIHTIEKMQRLIDEVASTNLGIILDPTNLIRVDIDKTYLEIVQEAFECFGEKIVAFHLKDFIIRNQQIFPVAIGEGQVPLTETIQFLNKHKPGLFTIFEETPFEKIASAYQKVSQYHSI

SEQ ID NO: 3976 - protein, 71 aa, Enterococcus faecalis
KEDEDMRFSNGGIFLLISMWQFIVTGRTFSYLKKEGGKRTSPFILLGLWSSLVFAIISFAVAIGSFFYVSF

SEQ ID NO: 3977 - protein, 270 aa, Enterococcus faecalis
  MISC_FEATURE (254)..(254): Amino acid 254 is Xaa wherein Xaa = any amino acid.
SRCEGPRQIAKALMLAIVVALLIFGGAYVTGHLTIDFFINTISVLGILLPVYYFSKMLTSKDVTAEEKPKVLAYLPLFLAAIVFWSLEEQGSSILALFANERTQTSLFGFPIAASWFQSLNPVFVVILTPIFVTLWTKLGKRQPSTVVKFSLGLVFAGLSFVLLMLPGLLYGTEGRVSPLWLFFSFFIMIVGEMCVSPVGLSITTKLAPKAFEAQTVAIWLLADAASQAINAQIARFYTTGTESAYFGIVGLLXVVAGNPLIIVKKQSQN

SEQ ID NO: 3978 - protein, 202 aa, Enterococcus faecalis
MHYPEHLKKAVLAKAKDLPLEGFVEGQGPQQPKVMLIGEAPGKEEIKENVPFIGRSGQLLMEQLQQVGLSRETVYITSAVRSRPFSVKTKQIAKTGERVTKFPNRTPTKEEIKIFAPLLDWEIAVCQPELILTLGNIGLQRLLGPKPTITAVHGTVIQSPIQTFDEQSQNYHWTQKTYQIIPLFHPAAVFYNYRLNEVAQVD

SEQ ID NO: 3979 - protein, 244 aa, Enterococcus faecalis
GQRETDIGALLNDEVQTPTVVTIAATGQRFEYANMYPTAKEIQLGDALSLTTGYKGGLSSRTGFVIENEQQLPEAQRDYLERVAKPYFQAVVHWLETIRIGLLGREMYQAIEEQLPKEIYHWHLNPGHLVSDDEWMSSPIYPDSAIRLESGMLFQVDIIPSVPGYTGVSAEECVALADETLQKEIQQTYPDMWQRIATRKAYLKETLKLDLPSEVLPMSNLVGYLRPFYLAKDKALCVEKPALK

SEQ ID NO: 3980 - protein, 281 aa, Enterococcus faecalis
FGVENVTTLLDELLDQEFRDKLLIYQTFMNSEGPLLKEEFYGYFDLSTQKLESLCRQINYECTQISSRSQILFPAKGLISAQKLSQIDYQALRKYYFDQSLMAKLLLDVGLYQKHTIQEFSQIHFMSKSKIYAFSYKLNLILANWHIKLKSTGLVGEEKNIRSFCFQCLYYFYGSNQERLPNILLENSPGIKRFINDLQLMYQRTFSLNQSAQLFILLTIQRFRVFSDHVVDSFSEVHVPSCLQQAFEKIYTSETPLFREDFGKDTSYIFLFVSLNEYIDN

SEQ ID NO: 3981 - protein, 330 aa, Enterococcus faecalis
NVIHSKFIRWKIKPVMIVGCSYYDQGTSRAQLHLRQILDAPGVNAIVMPGNEFLLGKAKEAFDENGNLIAEGTRQFLESTLQKFVEFIDVISKLEGAKPKDLPEDLHAKGTIETTIEGVDMAADDWVEQAAEAVQAVEGDTYVKLDRGILTVDQLNYFLKSMPMELTYADSNNQFLYYNKKMAAEEMFAKRQPGQVGNPLANCHPPKALKNVEWVIQQLRSGKTDAIRVHVPMHGPDTYVVHNYQAMYDDNGNYAGINEYILDFKPIVDWYLKQTGQELVGGKNVDAVSGASKKEAPETADSVSSASVHEEESATEKPTVDSVSSASIKE

SEQ ID NO: 3982 - protein, 341 aa, Enterococcus faecalis
TYSMKALEKGKHIVTANKDLLAQHGSELVALAQKHHCDLYYEASVAGGIPILRTIANSLAADNIQQVLGIVNGTTNYMLTQMVSADKSYEEALAEAQALGFAEADPTNDVDGIDAAYKMVILSQFAFGMNVSLPQVDIRGIRGLSLDDVAMAKQLGYEIKLIGSAEQNENSISVEVAPMLVNQKHPIASVRNEYNAVFIKSAGVGESMYYGPGAGAKPTATSVVSDLITIAKNIRLATTGHMFNSYQHKTQLTSSENVFGQYYFSLDVPDTPGQFLQLTQLMTKAEVSFDQLVQQKSDGQRARIVAITHQISKAQMQQVVIAIQNTEAFQLLNVMKVIGDE

SEQ ID NO: 3983 - protein, 225 aa, Enterococcus faecalis
VNMYEGLLKQYQAYLPVTEKTPMISLAEGNTPLIPLPNLSKELGIQLYGKYEGLNPTGSFKDRGMVMAVAKAVEEGAKAIVCASTGNTSAAAAAYATRAGIKAYVVIPEGKIALGKLAQAIMYGADIISIPGNFDEALKAVREIAKTEAVALVNSVNPYRLEGQKTAAFEVCEQLGQAPDVLAIPVGNAGNISAYWKGFKEWHEKQGTTLPRMHGFEAESARSDR

SEQ ID NO: 3984 - protein, 252 aa, Enterococcus faecalis
  MISC_FEATURE (55)..(55): Amino acid 55 is Xaa wherein Xaa = any amino acid.
LLFFYWRKKWFFCIVLTLRQRRFISENFPQNKIDECEDEKMKKFTLTMMTLGLVXTLGLTGCGKQEKKATTSSEKTEVTLPTKDRSGKEITLPKEATKIISLVPSTTEVIEDLGKTDQLIAVDTQSSTMMTDLKKLPQMDMMAVDAEKLIALKPQIVYVNDINLASSESVWKQVEDAGITVVNIPTSTSIKAIKEDVQFIADSLSEHEKGQKLIKTMDQEIDEIAKIGKTIKKPKTVLFEVAALPDIYSFGN

SEQ ID NO: 3985 - protein, 122 aa, Enterococcus faecalis
HNVKGTSESMKKFFKYLGSLMVLLLSIALILIGYLTFREFRPRAVEPVAINKQFSEQTIEKKQSISLVTYNIGYAGLGQTEDFFMDGGKTVQPVNKAMVQQNLTGIEETLKELPVMIYLFPE

SEQ ID NO: 3986 - protein, 212 aa, Enterococcus faecalis
CDIVEDSHLKIRLEEGKLMSLIVLIGAQAVGKMTVGKALEKQLDAKLLFNHQTIDLFANYLGYTERAFQLSDSVRKELFHAFVENPATNTTKNIIFTVVIAFDQEQDFQFLEEISEIFLSKHESVYFVELVSSTSIRLERNVHPERLEAKPSKRDVDFSRKELLNTFKEHRLVSHEGELESIFPNVKIAKINNSNMTPEEVATKIIATFGLT

SEQ ID NO: 3987 - protein, 246 aa, Enterococcus faecalis
RRMAIEKYFQTIDGSQIFYQIFGKETNYPLVLLHGNGNDHTFFNYQISYFSKEYQVIAVDTRGHGRSTNTQSQLTFPLLAEDLAGIIQQEHLTKINLLGFSDGANIAMVFTHLYPDFVNKLVLNSGNVTMSGLKKYVTIATYFQYWFCRIGAFFSKKLRARLPIVALLFEDTGLTKQDLEHIPCPTLVITGSRDLIALSHSRAIADAIPAGKLVLVNKQGHLFAKNSPDIFNKTIEKFLKEMKVSK

SEQ ID NO: 3988 - protein, 76 aa, Enterococcus faecalis
PCLFTKTNLPAGMASAIAREWESAIKSRLPVITRVGQGMCSKSCFVSPVSSNNRATIGSRARNFFEKKAPIRQNQY

SEQ ID NO: 3989 - protein, 100 aa, Enterococcus faecalis
MKQIIHWIKTHTGLLKTLFVIAVSIIVVAQLLSIGKTISFEQLKQMFDEIPLWKLLLMIVIGLVSVTPMLNYDLTLNPILNLKVSKRELLETNWDCQYHP

SEQ ID NO: 3990 - protein, 61 aa, Enterococcus faecalis
LKQVKFLKYNPSFFPPTIFIKKTKKHFGCEPRGRIAFVVPPQFTYLSQDKPYVVALTTTLC

SEQ ID NO: 3991 - protein, 220 aa, Enterococcus faecalis
KLLEEKMMDYILEILPALVSGAGMTLKVFFFTLLGSIPLGIIIAFILQSSFKPLRYLINLYIWLMRGTPLLLQLIFVFYGLPLIGIVFERYDAALFAFILNYAAYFAEIFRGGIQAIPQGQYEAAKVLRLTRFQTVTRIILPQVVKIVLPSVGNEIINLVKDTSLIYVLGLGDLLRAGKIAMSRDVTLVPLALVGVIYLLFTAILTVASKKIEKFYQYYK

SEQ ID NO: 3992 - protein, 246 aa, Enterococcus faecalis
  MISC_FEATURE (216)..(237): Amino acids 216, 217, 223, 229 & 237 are Xaa wherein Xaa = any amino acid. 1               5
EDSTMLTIKNLTKHFDNRTIIDHLNLEIPDGKILTIVGPSGGGKTTLLRCLAGLETIDSGELLLDGVPFNPAEMDNADQVVGVVFQDFQLFPHLSVLENITLAPTLVLKEEKAKSQQEALELLEKLGLAGKEKLYPYQLSGGQKQRVALARALAMKPKVLGYDEPTSALDPALRQQVEEVILHLLKQGMTQIVVTHDMAFAEKIAHNLLTVAPFQXXRSFMMXKKYPLXLAGLSVGXFTPYLAGCW

SEQ ID NO: 3993 - protein, 121 aa, Enterococcus faecalis
KSIRRIPPKDPNIFLIERPTAGEIIALWWTTSSRGKSTDKYIPKYFKRIYRVDMIKQRKLFIKANVISEENNTYVLTELGEMLVHKYFYIIEEHNNSSNDSFNTERRKLADKILYSLGGEI

SEQ ID NO: 3994 - protein, 291 aa, Enterococcus faecalis
NIMQTEVKEFIAFDIETTGLDFHQDAVIQISAARYVDGIEVDYFDTLVNSDYIPDEITKLTGITNDQVLNAPTLDEVMPYLFDYLGDTILVGHNIKSFDFPFLKAKGYNIAEGHEIYDTRYFAATRKHGAVNNQLTTLKLLFGIDAISHNALNDVRISAIVFMELLKIEPQEKSSTLKKSSLDSFELDDDTTPFFEGMSFVVTGAFDDSKYNRKQIETLIKQHGGRVSSSLSAKTDYFIQGIQISSQLKDGKHSSKELKYIELREKGVDIYKFNGNQFYELITNYRKLRKN

SEQ ID NO: 3995 - protein, 128 aa, Enterococcus faecalis
KIEEKLMTELKKITSKNGHVYLFKDIQHKQRNELGIASGQSVLISIFEPDPFYFTEDIRLIHYKDIVKTESVSSKENEFFEYVKQNSPVAYKKKISDSDSISEYINYAPQLKFKYIIKGGILTITGGN

SEQ ID NO: 3996 - protein, 92 aa, Enterococcus faecalis
LLPGEIKDRNVNFPISQPYVYVDKPENEIPLDNNLKFQYVVNDFDIHAPEYKISFILGTSKAEYGRSFNMKNFEGVLRTPSEISSMKAKKKK

SEQ ID NO: 3997 - protein, 224 aa, Enterococcus faecalis
SRGEDRNHVYQAVDLLKRTYNIHKGIKISIDKRIPVAAGLPGGTTDCAAALRGLNKLWNLGLTMDELCEIGSQIGMDVPYCLRGGTAFANGRGEKIEALPTMPQCWIVLVKPRISVSTSTVFNDLAVDELHHPDIAGLRIAIENGDYTGMTQTVGNALESVTIARHPIVQQIKDRMLKYGADAALMSGSGPTVFALCEKKTRAQRIYNGLKGFCEEVYLVRTLK

SEQ ID NO: 3998 - protein, 126 aa, Enterococcus faecalis
DVLRMLKTAIQNDQIKAGRELNGEEELTVLSREMKQRKDSLSEFEKAGRDDLVEKVKVEIAIVEKYMPQQLTEEEIRQLVQEVMTQTGATSPKDFGKVMGAMMPKVKGKADGNQVNAIVKELLQEN

SEQ ID NO: 3999 - protein, 355 aa, Enterococcus faecalis
LSKSNQVRLLFKQIRMWYHCKGLYNKGDGRFLTDNQSKSLELILTDSDDAHMLLGTHDKHIKFLEENTHVTINSRGEVIQLIGESSEVELVASVLRALQTLIQRGIKVHTPDVVSALKMAKAGNLEAFIAMYEEEIMKDHHGRAIRIKNVGQKKYIDAVKTHDVIFGVGPAGTGKTFLAVVMAVAALKKGEVQKIILTRPAVEAGESLGFLPGDLKEKVDPYLRPVYDALYQIFGMDHTNRLMERGVIEIAPLAYMRGRTLDDAFVILDEAQNTTVAQMKMFLTRLGFSSKMIVNGDTSQIDLPRGVTSGLVNAERTLKDIEKIAFVNFEASDVVRHPVVAQIIQAYEKEQQKHS

SEQ ID NO: 4000 - protein, 224 aa, Enterococcus faecalis
VEETYKQTVEISRCSLRLHEKRCTNNAALLYSYELKNTPQEAITHDAIRAGQYYVPHPWLRGTLTNWDTIQKRIARLKKINAMEEDGTFEVLPKKEVAGLNKERERLEKFLGGIADMPRIPDVMYIVDPRKERIAVQEAHKLNIPIVAMVDTNCDPDEIDVVIPSNDDAIRAVKLITAKMADAFIEGNQGEDQATEELFVEETPEATSIEEIVDVVEGNNESAE

SEQ ID NO: 4001 - protein, 215 aa, Enterococcus faecalis
YPRRTQIMADVTAKMVKELRDMTGVGMMDAKKALVKVEGDMEKAVDFLRENGMAKAAKKNDRIAAEGLANVATVGNVAAIVEVNSETDFVSKNEMFQDLVKDIATKVAENKPATMEEAMAIKTEKGTIESDLIEATTVIGEKISFRRFEVVEKADNAAFGAYLHMGGRIAVLTVIDGTTDEEVAKDVAMHIAAINPRYVNESQIPPEELEHEKTV

SEQ ID NO: 4002 - protein, 233 aa, Enterococcus faecalis
WLPRFFPWHWLNHTPLNTIQFPWRFLGILSVMLAFFIAQDEWGVFRKSWTVALLVFLAISNLGIYQYQSIQSQQGRLLTKAEYEQPAPFYIGAGHEYLPDEINYQELLKQKKRPLDYSAEQVTITNVRMPYGKISFDYQVVNQSAKVTVPFIYYLGYQATIQMKNQTGAKKMSLTNQGGLTALSLSGTGHVDIRYQRTKVQKIGTMITLLSVGGFGFSRFLQQKKKHKIKEQR

SEQ ID NO: 4003 - protein, 220 aa, Enterococcus faecalis
PRNGKLLSGLTTKSNCVRRRKRQVKKLRELTVEELFESFVLIKNADVRVAKNGKKFIAFTFQDTSGTIDGKYWDASEDEITRFTAGNVVLLNGKREVYQNKPQVKILHMRLATAEEPSQPSLYMERAPLKKEEMVEEINQVIFEITNAHWNRIVRYLMTKYQQEFYEFPAAKRNHHAFANGLAYHTVSMLRLGKAIAKEYTEINTSLLYAGIILHDLGKK

SEQ ID NO: 4004 - protein, 674 aa, Enterococcus faecalis
TQQDLLQVAEQQRLFPLYEEWQSLPEETENVVLVKEDQVQLEETFQEYMFLHKERQRLTKELSLQSEALDVPEGYAFYLEQDALIQQLLNQRYDMQQLMTESEWMTQTFEQNRQEMVLLENECSWSPERPPQLFYDNETVQKWRQQQVAYTQALQKGQEQKAFLASQIENLEDQLTDFEKAHAAFFGEATRAQKAQKTSQPLWLLLGSILVLLGFFLPSPLKWGLVLVGVSFIAKEVLSYATRKEASSDEVKEEWQTKLSQLDYLNEQFQQALNQEREAQLQVEQLEQAVAEQAQVHQLGKMQQIDTLMNQRELITRYLLLVQTNEELMSQLKENQQKRQVFEEQIFPLMTHLPLQGKSLSEKLHFLEGFAEEMEKVRFAQEYQADGYLKQQLRELKTKQQEALTRIQPLLIRYRILSIADVPSRIQQLTTQQAQVGRGQELATQLGNLFPEAVTEATLKDRSLQLAQQQALEESQLDKIQEQYQALIYEKQQLMTDGTLDELYQRQAILKAEIKELAQRWSGYQLAGQLLMDLLTELSEQQLPSLLQYASSYFALLTNQRYQSIQVAEGQLVAVTKEQEMFYLHELSTGTKDQLMMAVRFAFLAVQGEQLICPIIIDDGWLHYDHQRKAQLAELFTKFGQKQQVICFSSDQEMVSYYQDLQQRVIALEGGSVK

SEQ ID NO: 4005 - protein, 124 aa, Enterococcus faecalis
RGNLQRSRRRMSEQPQQRSTEEVEAIKEDILTALETVIDPELGIDIVNLGLIYEVEFAEETGDTVIKMTLTTMGCPLADVLTEQIHGVLKDIPEVNNIEVKLVWYPAWTTDKMSRYARIALGIR

SEQ ID NO: 4006 - protein, 183 aa, Enterococcus faecalis
KGAFMQFTLLNQENQAYWEATYIEAFPEEERLPFDQLLMSSQAGKFHLFVIQEADENVGILLNSPIAPEATYVFFFAIDQHHRNKRLGSTVLALLKTRYPKGVLLESEEIGKNAANEAQREKRYQFYERNGVLDTGYLIMDRGLTFHIMFAGASGFGGTQLQFLLDFHPVAKIWKKPSIDGIR

SEQ ID NO: 4007 - protein, 166 aa, Enterococcus faecalis
IASIRLMIPDRYLTYFDQVFPDYLPNPVPKKYTWNEFLLDNFTKFERVHQDPQLKRFAELTHSIGNITVVPLGFNSGRSLSFKDYWDYSLEQLSIFLASFHSWESYVHTYEMQPFLNEQYQPVALWKNHLKKDSFILPQNIEEINEYLVQVNQRIEKRGQRIVNRL

SEQ ID NO: 4008 - protein, 140 aa, Enterococcus faecalis
KNIEKIVGWELFKVAEITVKTISEKDDLKKLFLGQEYDQQQPVKNILKARTSNVHIEKYEVVEDVFLKLTGKATAHKDIMNSFWTTYKIMLQLVYPDFFRPAEVIGENQESYLEKPSEQNFLAVNSKYPPHDSGPIFNLF

SEQ ID NO: 4009 - protein, 218 aa, Enterococcus faecalis
MKLGVIAAMDLELQKLLEYFPPQRKIQLAKNTFYIYEQKTSQVIMVCAGQGKTNATLYSQILIDSFQIEQLINIGICGCLNEKLQLFEMVLGEEYCHYDIRERQSINKFPYQLYYKGDKGMLAELQHLDEKIKCVRFGTGEGFVCDTTEKRNLIEQFSIDCVDMESAAIAQCCFLNDCAFVSIRIICDRADANAVKVTEDTQTQAMEKVFELVCAYIN

SEQ ID NO: 4010 - protein, 128 aa, Enterococcus faecalis
DMGREVVHSKSSRLLSQDTLRKYVIAGGDFNQVFKGSHRYPDLGEAGWVPGEIDPADLPKHFSLAYDDQQPTVRVLNKPYTGSYETSQVYVIDGFIVSDNVAVHSVKTKDEQFKYTDHQPVKMEVGLK

SEQ ID NO: 4011 - protein, 111 aa, Enterococcus faecalis
KRGGSTMPNILLTRIDNRLIHGQVATQWNGSLGANLILVANDAISEDTLRQQLLNMAAPAEVQTRFFSIKKTIEVIHKASERQKIFLLVDNPVDALRLVDGDVPIEKLNIG

SEQ ID NO: 4012 - protein, 145 aa, Enterococcus faecalis
MIGLILTGHGVFSTGMHQSVSMIAGEQANVQAVPFFNDTGLDVLESNIRKAVDSMLETCPAVVILTDLLGGTPFRISMTVASNYPNVEVLAGTNLPMVLEGLALRTISTNVEDFVSMVTDSARDGIVHKKLEQPQANTQEEADGI

SEQ ID NO: 4013 - protein, 284 aa, Enterococcus faecalis
RKNFMKWCFQTWSGPVSINTLFIVHNNECPMETSVGFVGKVLSGDGAAHLWYAVMMLQFQLFMPYFIWLATRITKNKKVILPIVFFTIGAHILWCFWYQKMIFPYVETSLWYLIDRSGLSYLIYGIFGVIAAKYQGKIFTFLKKTRVALFLLFLFIFWQAVQGNLFDGTQMTPNDLPYLDPLQSAYSLLIIGLVFYLGTQGIAKKIRLLPMVKWIATYAYRSYLANVFIFQVVLKLVHPFLTNQPVSLVILVLYMGTFVGSFGLTVVVEHFFKSIFKLGRLVSV

SEQ ID NO: 4014 - protein, 67 aa, Enterococcus faecalis
RECENSSQTNAMRTAIKKFEEAVAAGADNVDALYNEAVKAVDMAATKGLIHKNKANRDKIRLSKLAK

SEQ ID NO: 4015 - protein, 108 aa, Enterococcus faecalis
NHSVCVETFVSGVHHKSMEVFVKVVGEDLTTGERYLAATCFTTFVAIPSHMNPESDFQLAAVVPETAEEKLICSNYETRRQQRLALREETKLFSQHLTTDLPWIDSPL

SEQ ID NO: 4016 - protein, 227 aa, Enterococcus faecalis
WSREQLSVKRKQEVQELRTLIVSIERDGLQESLKQGEISVRSYRMYQRLITRMQRSIAKQLLSIVGFWLLFARQIISILLHPKLFFNRGEASEEEKELRNEELENIRQVFLRNSQVILKSLDNLRGVYDDDLIDFFIDGRLDLAHKFEKGEFIDSYIVHTETDYVKDLLLGFQEERRMIDHYEQSERISIIEANELRKNVNLLESYSISGEVNNVPLKRFVKNFNKE

SEQ ID NO: 4017 - protein, 287 aa, Enterococcus faecalis
KELVVSVKELKVTDLTKTYGEKTLFDHLSFLIHEKDRIGLIGINGTGKTSLLNIIAGVDSGDGDLAAIQQPSDYQIGYLSQNQTFDENITIAEAVFQGDSPIIKAVKNYELALAALSENGLDEGVQRRYTQAEEAMNKQDAWTADTNAKIILQKLGIPTLEKKIGELSGGQLKRVSLAQVLIEAPDLLLLDEPTNHLDYETIEWLENFLNNYRGAVLMVTHDRYFLDRVTNRIFELSFGKLYEYKGNYETYVMEKAERERVAVEQEEKRKRLFKQELAWMRAGVQAR

SEQ ID NO: 4018 - protein, 163 aa, Enterococcus faecalis
VQPVVQTRAEIWAAANVLAPIMLLEAIVLPGNKLLPLGGIIAMGVTPALLVVTRGKLIRMIIIGAIELPLFLWSGTLIAPFVTETAKKVGAFPAGLNNNTLISHTTMEGPMEKFLGYLVGNASQGQLEFILYACLALVAYLLIFIWYAKQMKKRNIIYAQKAQ

SEQ ID NO: 4019 - protein, 261 aa, Enterococcus faecalis
NKRYTNNGAMKMLKEERLNAIVSLVDQKGAIKVTEIMERLNVSDMTVRRDLTELEAAGRLKRVHGGASSLNTYRPHELSHADKQIINSVEKKEIVQKALSLIHEEETIFLGPGTTIELLAEAMEFKHLRVVTNCLPVFETLSKKKNALTIYLVGGEMRLLTKSFFGEIANKALEEMHFHKAFFSCNALKDNKIMTATIEEGQTQAIALDNSIEKYLLMDISKVEKQDFYSFYQLEEVTAVVTNKDKFDTSKVLEKVVRVIY

SEQ ID NO: 4020 - protein, 88 aa, Enterococcus faecalis
DTANEFSTQIDWHNYQRANWREVETKGDTLTLHFANAGGAGGSYTQFTKVGTNTVVVSFDGNAAYPDNPSSVLLVQNSDYKVLRTLNQ

SEQ ID NO: 4021 - protein, 631 aa, Enterococcus faecalis
KSWKAQMNQTANSKKKRYITGFDGIRTIAVIGVILYHLFPQVMRGGYLGVPIFFVVSGYLINDLLRQEWAENQTIDLKGFYVRRMKRLYPALIVMLLSAVSYITLFQQDLLNNIRSVVASSIFYYNNWWQIFKGFSYFDGFATQSPFVHIWSLAVEAQNYLIWPLLFILLERFVRKRGRIFSLVLIGALISVTLMAVLYVPGADPTRVYYGTDTRVFSILLGSALAYVWPSTRLKEEIPEASKKILNGAGLSALVLFMFNPFTLSDHTNFVYYGGMFLISLAPTFLVAVTAHPGADMNRWLTNPFFTWIGKRSYGIYLYQFPIMIFYEAKIKTLSDHVFLHSLVEIALILVVSELSYRFIEHPLTRLSYKDVWTQFTEFLRKPWDLREKGTMAFMTVISVIAVFGLIVAPANAKSAQQEQLEKNIAKNQQKIEERKKEVQESGTKNSSTSTESSTKPSESQDVLPTQLTPEQVKKAQNLEITTIGDSVILDGASGLQDIFPKMIIDGEVGRQLYSSISLIGELDKKKMLKNTVLVSLGTNGPFTEAQFDEFMKALGNRKVYWINVRVPTRRWQNQVNSLLSQMDKKYDNLTVIDWFNYSNAHDDWFYDDRVHPNVAGGEQYTHFIAEKILQ

SEQ ID NO: 4022 - protein, 184 aa, Enterococcus faecalis
GFHSCGEAISTSGRRRYNWIFVLLTNCLGGFLVAYLFGHIVGLTEGAFLDKTVAVAQAKIADPPLVAFVSGIGCNIFVCLAVYLGALAKSYLGKMFGLWFPVMVFVVCGFQHVVANAFIIPAAIFSQSTTISWWDYLQNTLWVFLGNAVGGSLFMAVPLIFMTKPATVKPRVDKTIHTEELYGN

SEQ ID NO: 4023 - protein, 212 aa, Enterococcus faecalis
QNQQLSNQELIKRFILRSSMAIEIPNMIQIGSTGRNSGKTTLAETLIKQYQEVYPIYGLKIITISGQRGVCQRGTKGCGICTSITAGYELVEEQETIGNKDTMKLLAAGCQKVFLLKVFQENLAEAIQQFLKAVPAQALIICESNSLRNVVQPGLFLMMNNQNRQKESAKKVIDKADFCLLSAEIPKKLRIYYQGEQLQVSLKRGNKKECVH

SEQ ID NO: 4024 - protein, 63 aa, Enterococcus faecalis
IRNFFGISADSKQKSALSMTFFADSFWRFWLFIIRNSPGCTTLRNEFDSQMINAWAGTAFRNC

SEQ ID NO: 4025 - protein, 158 aa, Enterococcus faecalis
KGMCALSLIEKEAIILENDADPQRILNILIELQFASEERYIDQETAQLVAEHLHLTEARVYEIVSFYAILKTEPQAKYVLKICNSTPCHYTGGANVAEVLETILEVPENQPTADGLFMYHNIPCIGACDLGPVIKIKDTVFSQLTERENLSINSTFTK

SEQ ID NO: 4026 - protein, 216 aa, Enterococcus faecalis
  MISC_FEATURE (141)..(212): Amino acids 141, 161, 206 & 212 are Xaa wherein Xaa = any amino acid. 1
RTVGGESMLKRNQPMLLERMGKMQSATDVAEYCKYDGFDGLKRAISLSDEEILNELDIAHLRGRGGAAYPLGKKWRHLYHAKGTTKYIVCNADEGEPGTFKDKVLLSEDPLSVIEGMIIAGYLFSAKAGYIYMRGEYRRIXKTFQEALDNARQAGFLGENXLGIEGFNYDITIISGAGAYICGENSALLNSIERKNGRPRVKHHTXQMLGYXCNQH

SEQ ID NO: 4027 - protein, 221 aa, Enterococcus faecalis
IMLNHLQVCLVILREGGQAFLEMGTADGGGTKLICLSGHIKNRGLYEVNLGTPLEEIIYGEQYGGGSATGRALKFIHFGGQSGPIGAVATLRDCLYSYEDLWAHDLSVGSGAIVVMDDSVNVVDYLVHVAAFFAHESCGKCTPCRLGTTRILELLSKFNRNEATASDLPRLEKMLTHVTRLSACGLGQSVANPMKSALALFPEEFETTAETEIYATSKGGW

SEQ ID NO: 4028 - protein, 112 aa, Enterococcus faecalis
NRNLCHQQRRLVKMKTKLHTQTVTLSIDNQEVTVPKGTTILEAAKGLGVEIPTLCHLKELAPDGSCRMCVVEVEGGRRGGLTTACTAHCQEDMVVATHSEKVADSTTSSPRD

SEQ ID NO: 4029 - protein, 278 aa, Enterococcus faecalis
  MISC_FEATURE (20)..(20): Amino acid 20 is Xaa wherein Xaa = any amino acid.
SVRSSNGLINRFHQNERTCXIIEELANGEIDIVVGTHAWIQQDVSFHQLGLVITDEQHRFGVNQRKILREKGLKPDVLFMTATPIPRTLAITAYGEMDVSIIDEMPAGRIPIETRWIRPPQLDTVLEWMEKELARGHQAYIICPLIEESEALDVKNATEIFEHMQSFYSPRYQVGLLHGKMKNQEKDDIMQEFKDNQLQLLVSTTVIEVGVNVPNATVMLIMDADRFGLAQLHQLRGRVGRGSSASYCILVANPKNEMGVERMKLMTETTKCPPRVRT

SEQ ID NO: 4030 - protein, 364 aa, Enterococcus faecalis
  MISC_FEATURE (351)..(351): Amino acid 351 is Xaa wherein Xaa = any amino acid.
GGDFMDITDLVSVLPGVGPKRAENLQELGIATIEDLLTYYPFRYDDIQEKDLSEIQDQEKVTLKGLVVSEAVVSRYGYKKSRLTFRMMQEHAVINVSFFNQPFLKDKVVLSEEIAVYGKWDAKRKSLNGMKILASKGDNEDFAPIYHVNKKVRQSTLVQLIRTAFEEYGSLVEEILPNDLLEKYRLMPRKEAMWAMHFPSNPEESHQAKRRVVFEEFFLFQLKMQGLKKQEKAEKNGLAIQYDVDRLKTFTQGLPFELTGAQKKVTNEICRDLRSPKHMQRLLQGDVGSGKTVVAAIALYATMTAGFQGALMVPTEILAQQHMESLQQLFDPLEVRTALLTGSTKTKERVXLSKNWPMARLTLW

SEQ ID NO: 4031 - protein, 71 aa, Enterococcus faecalis
NSLVSGQVPQPLGKQPWRTLTLKKKISYEWIDGKIVDSEADRFNASLKTLNRMIDEDTEIVTIIVGERWFG

SEQ ID NO: 4032 - protein, 208 aa, Enterococcus faecalis
VERSLRKLTQSPDLENFFKTSIQKNVIIERKQQNQTIWHWLLLILFGLLTFGSLTQQLLLIGLFTLIAAIVKGPLMLVWGTIYSALVALFPPFALVLSLLFFIINLGTVMKSWRITLTSAYFYLVPLGFSLLKTTNWVSTPYFLTGLALLSILGLHFILEWLYKNNSLGRLLTWQIISVPFSLLLIILPSRLTKGRFGKKRIPKKVKL

SEQ ID NO: 4033 - protein, 96 aa, Enterococcus faecalis
CGGSLMAYHKFKFYEQRKNDPKWRPYYLEAMRVREQARLTVQRRKRRARIRTFLVVAILVILVFLLLAHWTYSQTNELSFSSFIDVLKSKINEFLN

SEQ ID NO: 4034 - protein, 493 aa, Enterococcus faecalis
GDIRLVTILRRTSQILINQILVKNEMLNNFIKPGLEDLAVSRTTFSWGIPLKNDPKHVVYVWIDALSNYITALGYGSEDDSLFQKYWPANVQMVGKEIVRFHTIYWPIMLMALDLPLPKKVFGHGWLLMKDGKMSKSKGNVVYPEMLVERYGLDALRYYLLRAIPFGSDGVFTPEDFVSRLNYDLANDLGNLLNRTIAMINKYCDGKVPAYASKVTPFDSELSTTAANVIGKYHEAMEKMEFNTAIAEIWTLVSRANKYIDETAPWVLAKEEEKRNELESVMIHLAESLRIVAILLQPVMTETPGKIFEQLGLDPETMNMENIHFGEFPTDVTVTSKGTPIFPRLEIETEVTYIQKKMSQSESATEEDIKWNPEETTLVSTKEKQIKYDDFDKVELKVAEVIDCKKVKGADKLLQFRLDAGDENHRQILSGIAEFYPDPAALIGKKVVIVANLKPRKMRGQISQGMILSAESPEGKLQIVEAPKEMPNGAGIA

SEQ ID NO: 4035 - protein, 67 aa, Enterococcus faecalis
LFSIFLGETVEPLNYTNVPRGVYTNPEIASVGYTRETLPAEKEVVIGTFNFNGDGKSLCVTGRVCGM

SEQ ID NO: 4036 - protein, 348 aa, Enterococcus faecalis
AGVIKMAEQTDLLILGGGTGGYVAAIRAAQKGVNVTIVEKYKLGGTCLHKGCIPTKALLRSAEVFDTLKQAASFGIETEAASIDFSKIQQRKEGIIEQLHKGVEGLCKKNKIKILAGEGAILGPSIFSPVSGAVAVTFNDPTREEEIIVPKNVIIATGSSSKTLPNLPLDEEFILSSDGMLELEELPESIAIIGGGVIGVEWASLLNSLGVNVTIIEFLDRLLINESATISKELKKRLEQRGINILLGSKVQEAKVTGQKVQVEVAGQETLTVDKVMVAIGRQPNINKLGLQNTSVKYTDKGIEVNEFYQTTEGHIYAIGDCIDTLQLAHVAMKEGELAVQHLFRRDS

SEQ ID NO: 4037 - protein, 131 aa, Enterococcus faecalis
LTISQVKKLIAGNSGLKSYLGETDLRHIQAQIAAGDQTANYYLKGMCYQIAKSIGEMAVVLEGTIDAIILTGGAAYSQTVVQEISQKVTWIAPIKVYPGEMEMAALYEGVNRVLTGEEQALNYSEAKIEQE

SEQ ID NO: 4038 - protein, 232 aa, Enterococcus faecalis
LPRGGHIVYMGRGLAFQKKIGDTINPDYVEKEFVLKDSAMAGQFQQLFEDVPTKEVEVVKQIVDLAETTLAIELSSNIYLTLTDHIHYALLRAKEGIDIPNPLVFETRKFYPKEFEIAKQALAIIAEKLGVQFSENEAGFIAFHIVNAEQGNGNMEVTMEATKMVRDILTIISRYFGQVFDEDSLNYQRIVTHLQYFAQRYLKQEAHDEEDEFLFALVQGKYPKGVSSGPTY

SEQ ID NO: 4039 - protein, 63 aa, Enterococcus faecalis
NKKRMMRRTNFFLHWSKESILRAFQAVQRINEYLLKSYDRPIDQPEMIYLTIHIQRVVNDKKA

SEQ ID NO: 4040 - protein, 241 aa, Enterococcus faecalis
VFLILKINGNEDLEMSKNQEIAARVLKAVGGEGNVNSVVHCATRLRFKLKDENKADTAALNADPDVIQVVQSAGQYQVVIGSHVSDVYKDLMANSGLGNDSDNREKESGGNIFNRLIDIISSIFTPFLGAMAGAGVLKGFLTLAVTMGWLADTSGVYLVLFSIADGLFTFLPIMLAFTAAKKFNTNPFLAVALAMALVHPSITALAGKTISFAGLPVIIGPSGYTSSVLPIILAVFAQSYV

SEQ ID NO: 4041 - protein, 82 aa, Enterococcus faecalis
RFFKKVIPSFLQIICVPLAVFLIMAPVTFLAIGPIGTVIGDWLGQGYNAIYAFSPIIARFIKWVRWWQSWVRYGMHWGFCTN

SEQ ID NO: 4042 - protein, 119 aa, Enterococcus faecalis
IEERRKTMNVHNAEIVISAVSPKQYPESQLPEIALAGRSNVGKSFFINTLINRKNLARTSGKPGKTQTLNFYLIEDALHFVDVPGYGYAKVSKTERAKWGKMIGTYITQFEQLARYSTK

SEQ ID NO: 4043 - protein, 87 aa, Enterococcus faecalis
NNIKNYCLIDDTKLEFEPEALKAIAAKAIERNTGARGLRSIIEEIMMDVMFDVPSDESIEKVIITKMAAEGTGKPTIIYNKKDKEAV

SEQ ID NO: 4044 - protein, 335 aa, Enterococcus faecalis
TDNNGTVRCSFCGKTQEEVKKIVAGPGVYICNECIDLCKEIIDEEFYDEAVRELTDVPKPQEILNVLNEYVIGQERAKRTLSVAVYNHYKRVNQSETAATQDDVELQKSNICLIGPTGSGKTFLAQTLAKTLNVPFAIADATSLTEAGYVGEDVENILLKLLQSADYNVERAEKGIIYIDEIDKIARKSENVSITRDVSGEGVQQALLKILEGTVASVPPQGGRKHPHQEFIQIDTTNVLFIVGGAFDGIETIVKNRLGEKTIGFGKTNSALNEEESIMQHIIPEDLLKFGLIPEFIGRLPVMAALDKLTNDDLVRILTEPKNALVKQYQKLLSH

SEQ ID NO: 4045 - protein, 100 aa, Enterococcus faecalis
YCFTKAFFGSVKIRTKSSFVNLSSAAITGKRPINSGIKPNFNKSSGIICCMMLSSSFKAELVLPKPIVFSPKRFLTMVSIPSNAPPTMKRTFVVSIWINS

SEQ ID NO: 4046 - protein, 260 aa, Enterococcus faecalis
KGRCCMIELKKTAVTLQQTPILKDISLVFPTGSKTCILGPNGCGKTTLLKTIAGLVPYSGSVLIDGQEVHGQKRKELATKVAMMSQFTTVAFDYTVYETVLMGAYRQQAQRFLPIVSKQEKERVLYYLERTGLLPLKDKVVNQLSGGQQQRVFLAKLFVQDPEIILLDEPNNHLDIRYQQELIQQLNEWSAQEGKTLIGVFHDIRLALTLSEKIVFMKQGKVAAQGDFQTLASKEFLQTIFETDIVSYFQKQHKVWETIQ

SEQ ID NO: 4047 - protein, 183 aa, Enterococcus faecalis
RQRIRNTMACFNKSAKEPKTKYVMVLALGSFFMEVTMKRIILMGAIGCGKTTLCQALQGKELIYDKTQAVEFHTEMIDTPGEFILHRQYYNALNVTAAEADVIGLVQSAVETQQVFSPGFGSIFPKEIIGILTKIDLAQDSQQLEIVRQQLKSAGATRIFEISSVEKIGLQELVDYLEEDEAE

SEQ ID NO: 4048 - protein, 191 aa, Enterococcus faecalis
SRMKIYTKTGDKGMTKLVGSSTVAKDSDRVESYGTIDELNSWVGYIISQLPQENQEIKEELEALQHLLFDAGTDLSTPIEAQRPFKLQKASVHWLEQRIDFYTAQSPDIDRFILPGGTPAASMVHVARTIARRAERIIVRLNWTAKINEEVLIFTNRLSDYFYALARCLNVQAQRPDVSYERSGQLLFNTE

SEQ ID NO: 4049 - protein, 168 aa, Enterococcus faecalis
DVSLGIDPISGKQRRKRLTVSTKKEAQQIESKYLRLYHENKLTTNSDLTLKDIYEVYEEKYTQNLKPSYKQTQERIFKNYIEPYFKNTQIKLIKKQQIYDFQQFLLTSKPKRKETLSNKTINMIIIHLQKLFNVAMKEGLSYENPCNQIDKLKVQKKEIDLQTPHQGN

SEQ ID NO: 4050 - protein, 211 aa, Enterococcus faecalis
KKVRVLAKRTETRQLEVLKYIYEQVELKGYPPTVREIGKAVDLSSTSTVHGHLARLEKKGLILRDPTKPRAIELTPQGLEKIGIQPTTIPMLGVLTAGEPILAVEEASDFFPLPPDLRTEENALFMLTIRGESMINAGILDGDQVIVRKQSNANNGDIVIAMTDEDEATCKRFFREVDHIRLQPENDALAPILLDNVTILGKVVGLYRNHI

SEQ ID NO: 4051 - protein, 390 aa, Enterococcus faecalis
AMPTLKENIIQEIQRLGIDKIGFTHAEPFIELEDSLHEQRERGYNSGFEHQNVEERIYPEKTFEHPKSIISIALAYPTKAQEKMPRDEKRGQFARAFWGIDYHHILQDRLQKLIAFIEEQAATEAEKEHWRFRPQVDTGEYVDTAVAQRAGLGFIGKNGLLITEEFGSFVYLGEVTTNIQFEPDEPVPNGCGDCTRCITGCPTGALLGDGRMNAQKCLSYQTQTKGMMPEDYRKKMRNVIYGCDICQLVCPYNKGKDFHFHEEMEPKIEEVYPKLAPLLTISNKEFKQQFGHLAGSWRGKKPLQRNALIALANLGGREAIPQIILCLNDQRPVIRGTAAWSLGQLAKREPEQSLEALNYLLSVETEEEVIEEAQKAIHLLTSKKGSRSTE

SEQ ID NO: 4052 - protein, 62 aa, Enterococcus faecalis
PFIWWSLCGFLKNCFPPCEVLYRTMIHETFEGDTFFQELECFVGRKISQFSRCRGREKSLCT

SEQ ID NO: 4053 - protein, 67 aa, Enterococcus faecalis
QFPRIDLSDELYQKVKNGMRLHKKELGIKAMPESLVALFYQNQVVSLYMPHPTHDKLLKPSKVLRNN

SEQ ID NO: 4054 - protein, 323 aa, Enterococcus faecalis
KRRKFLHMQVIQLHHPYEPNQIPNEEVVMVLGFFDGVHKGHQKVIETGKKIAEEKGLKLAVMTFNQHPSIVFQKVLPENMKYLTSLEQKERLMANLGVDILYIVEFTSAFAQLKPQDFVDQYIVNLNSAVAVSGFDYTYGPKEIAGVKQLPTYAQGRFEVVTVPKEEMTGAKISSTRIREKMEAGEMEEVTELLGYIYETEGTVVHGDARGRLLGFPTANVKVKSTVRLPRIGVYAVQIEVGGKWYVGMGSIGHNDTFGEGRDLTVEVYILDFHQDIYGEQVVVRWNHYLRDQVKFNGAEALIDQLKQDERDTADYFQQSEDK

SEQ ID NO: 4055 - protein, 189 aa, Enterococcus faecalis
GQIMKIRQEKPAEYQAVERLTYQACKELNLTENWRPTEHFIVHLLRKSADFIPELSLVSETDQGKLTGHIMSSKAKLRLPDHTEKAVLTVGPLSVHPEAQNTGVGSALIKHSVHKAKELGIGGLIILGHPTYYTKFGFVPPTTFQITLPEKEHQKHYWLWNYCQVILAQVVGSGIFQHALLIQKHTLQN

SEQ ID NO: 4056 - protein, 91 aa, Enterococcus faecalis
AFCSQGQRIRHRRIDYPGPSNLLYEVRFCSTDYFSDYVTGKRTSEALLALELLPGYFGTSGGEWHFSTCFAYPETHPAELEAFEAELGINE

SEQ ID NO: 4057 - protein, 373 aa, Enterococcus faecalis
SIPWGRLIALASAALFIGGVATTDSTPTLSLDAESVETDANGSATIKGEYDGNSKLTANGKEVKTKDKTFAYKVKLSDEKTQKITFVAEKKDTKVEKSVEVTPSKEFIASITDSEQELAKTEKALAYAEKQPSQKNYDEAATLVSSLSQEYEEYNDRLEKIKEAVPVDEAVTTAEKSKSKSDYQAAEKLVAAAPVGKEGFQQRLTTVQTAIAEKEKNEQLVASATAAVEKAEQEPTNEAYYNEAVKQIDALNSPNQALTKRVAVVKTQLDAHKEKQRKEAEAQKLAAEKAQKEQAEAAAKAQAEAEAQQAAQAPAEVETAAAEAPSGNALIKGSRNGIYHVPGSRYYNRTTNPVAWFSTVEEAEAAGYRAPKQ

SEQ ID NO: 4058 - protein, 235 aa, Enterococcus faecalis
  MISC_FEATURE (212)..(212): Amino acid 212 is Xaa wherein Xaa = any amino acid.
KLREISNLSTFKVLNVTILVLFKNERMIYMKVAVLGATGKEGQLLLAEAKRRGMDVTAIVRNASKITDGTPTIEKDVYQLTTEDIQAFDVLISALGFPDVQDFPKSTQHLIEILTNQKTRLFVVGGAGTLYVDPEHTIQLKDTPSFPAEIQPLASAMGEALNLLKEAQNIHWTYISPAAMFDADGPATGHYEVAGEELTTNSQGDSYISYAXYAVAMLDEVESNAHPNQRISVYQ

SEQ ID NO: 4059 - protein, 143 aa, Enterococcus faecalis
LDMAMSTKLSVAIHILSLIETGPQEQVTSEYIASSVNTNPVVVRRLMSQLKKAGLIHSMRGANKNTLLKKPEEISLYEIYTAVELEREIFNIHQNPNPNCSVGANIQSVLETEFTKVQQKMEEELKSITLADVIHEIEVKRDK

SEQ ID NO: 4060 - protein, 130 aa, Enterococcus faecalis
WAIPGSMANILWFIFGGFFGGLSWLFAGVIWCITIIGIPIGLQCFKLAGLSFWPFKKRVVYSDSGVSLVVNIIWLIISGLPLAIGHCISGLFLCLTIIGIPFGQQSFKLAKLALMPFGARVVSTNDFYFE

SEQ ID NO: 4061 - protein, 265 aa, Enterococcus faecalis
QLFNQAFFSVSELRHAKKMAFWKVILNAVFVSAILALPITKQVFSVLQEVQQDGQKIAEKLPDFSIENGTLQTKAKESGFIYQTDSIIFTFDPDGKRTAADVQKDLIGNAFGLAFLQDEFVVALPNSGATESILGTDQFIFPYSKGTLDGVNAQSIKTALSEAAIPWWTKLIVFLVAIYPVLIGLVLDLLIAAIGASLYSKLRFYSLRLIDCLKIITYCATVPVILSAILNFVNPMFNDGILVILLSLFFFFVTTKNEPRNIPGS

SEQ ID NO: 4062 - protein, 142 aa, Enterococcus faecalis
EDMMKPKLILMSHGRMAEETLASTQMIVGELADAAIVSMTAEDGLSGTQAKLAAILKEAGNVPTLVLADLKGGTPCNVAMMAMGTYPQLRVVAGLNLAMAIEAAVSPVENVDELAAYLTQIGQSAVTTIDLPELTDEEEFEE

SEQ ID NO: 4063 - protein, 195 aa, Enterococcus faecalis
LSERGKTTYSDLGYYLLGEIIQVLDRCSLEESFQTYVFQPMNLQHTSFTVSDFAQAVPTEITKQRGVIQGVVHDSKAYQLKAPIGSAGLFATLPDLLTFVQCFMNNRYPSGKPLFSEKMFTALWSMNQGGRTFGWEVKKTQAGADYLYHTGFTGTAIGMKKETKEALILLTNRIHPTREERGFLKARTKIYQQYF

SEQ ID NO: 4064 - protein, 161 aa, Enterococcus faecalis
ICSRNLKGTFGISYLDLETWRTAFRGWAHMNFKPVVIIKVPLRMLVPNTVVFGQKNWTDLFPYNAEEDFEEGTGIIAYNIQPEYPLKTLQEYAITYSDNIAKNMVYDTLGGDAKAKREMYQRYLHKTPSIEEPQFSSEDALVILQKLYTEKSNKTRLPSDL

SEQ ID NO: 4065 - protein, 155 aa, Enterococcus faecalis
KRYKNMPSPILIISLKIWSMTHWVVMQKQNEKCISVICTRHLRLKSHNFLLKMRLLFYKNYILKKATKPDYQAIYDSMKQSVFHERMETPTTQGKVAHKIGSYDEFIHDMGILETPHPFALAIFTKGPDNAKSAAFIASVTDKLWQLQVSEYPNQ

SEQ ID NO: 4066 - protein, 119 aa, Enterococcus faecalis
LSCSFLIKKGVEKMKNEERRKAIALNCQKYESDYARLVEPINELLLNLGAAISEEAAKQIILNVKRYHHGVKYLPECHLDESNQFIEDGLEALKKGDLGNGALQLFGAGLNFASFAAKA

SEQ ID NO: 4067 - protein, 217 aa, Enterococcus faecalis
LKGSRKMVRLNVNPTRMELSRLKKQLTTATRGHKLLKDKQDELMRRFIALVKENNELRIQVEQEVTDALSNFVLANATLNEAFIEELVAIPAEKVELEIIEQNILSVPVPKMIFDYDESVQEAPLDYGYVNSNSELDQAFAKISSILPKLLALANVEKTCQLLSKEIEKTRRRVNALEYMTIPQLEETIYYIQMKLEENERGEITRLIKIKSMNKEN

SEQ ID NO: 4068 - protein, 84 aa, Enterococcus faecalis
PYARGTQPKELAVILGESFLSDVDKINAAFAQRFEEEYVNQGLDTNRSIEETLYLGWELLSMLPRTELKRIKEDMFDQYLTEGK

SEQ ID NO: 4069 - protein, 239 aa, Enterococcus faecalis
KKRLKKVGTSTQAALTDIPVLYLLHGMGGNHSVWARRTSIERYVADLGIAVIMPSTDLAWYTDTQYDMNYWTFISEELPKICHQLFPQLSTKREKTFAAGLSMGGYGALKLGLAKPESFAAVASLSGAVSLSSTSFGELLKVRKRSYWEGIFGPLDQIEGSIHDPLYLLQQLVESQTEMPQFYLCCGEQDMLLSANQQMAQALEQAQASYTFETGPGEHDWVFWDEWIQKALAWLPIPK

SEQ ID NO: 4070 - protein, 191 aa, Enterococcus faecalis
KFAQTSFGVQAPAIYWYFKNKQALLQSMAEAIEEHFQEPALCGEWYSDLLAFMENYYDLYQQFPCAVAIEIQTVPAYPQRLRHLNQMMGILREAGFSPEMTHLAVTSLQHLLFGMIMDATEEKQLVSQVLNGDDYLKEQVLHMKQYVSDNELTYMEESIQFRHSIHQKSAFIQAVKTYLDGLQADNTSSSK

SEQ ID NO: 4071 - protein, 553 aa, Enterococcus faecalis
NFSWFKTTGVDHQPVQGDITKAIALANELFPEYEFIHSNFDDYLKAVQEELPEDLGTVTGELTSQETDGWYTLANTSSARVYLKQWNTKVQRQLENIAEPLAAMAYEVTGDYPHDQFDYAWKTLLQNHPHDSICGCSVDEVHRGMMTRFENANDVGHFLADEATRQLTEAIDTSVFPEKAHPFVLFNTSGYQKTEVVTVEVEIERLPFYTGKPEDLYHELKQKATPDYQVIDPTGKAVASRIVKEDVRFGYDLPKDAFRQPYMAKYLTVELSVKEMAPFSWDSFALIQGETKAFEGSLLAQPATNEMENEFIQVKIENNGSLTIADKKTGETFSKLLTFEDTGDIGNEYIFFKPTEDQGITTENVTAEITNKENSPVKASYQIKQTVMLPVAADERLEEEQKAVREFRERLAQRSTTLRPFEITTMVTMIKESNQLFFETTINNQIKDHRLRVLFPTGMVTETHEADSIYEVVTRPNQVSDTWENPTNPQHQQAFVNVHDQNKGVTIFNEGLNEYEVLADGTIAVTLIRCVGELGDWGYFATPEAQCQGRIYL

SEQ ID NO: 4072 - protein, 626 aa, Enterococcus faecalis
ITMMIIYFLMSLLLFSNVVYYREFTDFITVNTMLGAGKVASGLGESALRLFRPYDVIYFLDFIIIGVLLLTKKIKTDARPVRARVAVSVTLLSVVFFLFNLFMAETERPQLLGRQFSRDYIVKFLGLNAFTVYDGITTYQTNQVRAEASANDMKQVEDYVKQQYAAPDDSKFGIAKGKNVIYIHLESFQQFLVNYKLKDENGVEHEVTPFINSLYNSKSTFSFDNFFHQVGQGKTSDAETLLENSLFGLDQGSLFTQVGGKNTFEAAPDILKQTQGYTSAAFHGNAGNFWNRNETYKRLGYDYFFDASYYDVNSDNSFQYGLHDKPFFNQSVQYLEHLQQPFYSKFIAVSNHYPYSQFTNDEAGFPIAKTSDETINGYFATANYLDKAVEEFFNYLKSSGLYENSVIVLYGDHYGVSNSRNQNLAELVGKTKADWNDFDNANMQRVPYMIHVPGQENGGVNHTYGGQVDALPTLLHLLGVDTKNYIQLGQDLFSKQHNQIVAFRNGNVVTPKYTILGSSIYDTKTGTLITEPTEEVKKEVADLKAKATKQLETSDQITNGDLLRFYTNSGLKPVNPEDYDYKNQLQQLEAIEKEKGEKSTSVYSKNNNKSTVDEYHTDSYQGYQKT

SEQ ID NO: 4073 - protein, 74 aa, Enterococcus faecalis
KYTWAMIANIAGALVTLVFGMIWLKYSANLPWPNAFAGGFAPFIIPGIIKAVAAAYVGILIRQRFMKRFLAHLS

SEQ ID NO: 4074 - protein, 185 aa, Enterococcus faecalis
KDKGVKSMSSLLKRLVQLVLLVVAVLLIRHYVFSPAAVNGSSMEPTLHNNDRLWVTSIKKPQRFDIIAFPSPRNGQRVAKRLIGLPGETVEYRDDTLYINGVSLSEDYLASAKRNVSKNENYTQDFTLETLEATQSLTVPEGMYFVLGDNRPRSDDSRYFGFVKQASVEGVLTFRYYPLDKIGFP

SEQ ID NO: 4075 - protein, 132 aa, Enterococcus faecalis
FPTRGEYQRYAILEYLIENHTHPTADEIYRALEDHFPNMSVATVYNNLRLFTEIGFVQEMSYGDASSRFDFSSKKHYHVICQKCGKIVDFHYPGLEDVEMAASKLTGFEINEHRLELYGLCPDCQQAQQENV

SEQ ID NO: 4076 - protein, 303 aa, Enterococcus faecalis
TDRGRRHLCKTKIVKEGIYNMKVVVVGCTHAGTSAVKSILANHPEAEVTVYERNDNISFLSCGIALYVGGVVKNAADLFYSNPEELASLGATVKMEHNVEEINVDDKTVTAKNLQTGATETVSYDKLVMTTGSWPIIPPIPGIDAENILLCKNYSQANVIIEKAKDAKRVVVVGGGYIGIELVEAFVESGKQVTLVDGLDRILNKYLDKPFTDVLEKELVDRGVNLALGENVQQFVADEQGKVAKVITPSQEFEADMVIMCVGFRPNTELLKDKVDMLPNGAIEVNENMQTSNPVGPAAGARS

SEQ ID NO: 4077 - protein, 106 aa, Enterococcus faecalis
VRKISKKVRITTLISLMLVLGGMIEKGGGKIINICSMMSELGRETVSAYAAAKGGLKMLTKNIASEYGQFNIQCNGIGPGYIATPQTAPMRELQENGDVIHLTYLS

SEQ ID NO: 4078 - protein, 120 aa, Enterococcus faecalis
  MISC_FEATURE (15)..(15): Amino acid 15 is Xaa wherein Xaa = any amino acid.
DALFSLVFDYDSSNXEQTVAKRKEKATVYATEQGLSGVFPRDSDKVVPSVVTVSQLDKAPEIYRTTQKDTGKEKTALVRLEYSVRIAGSQAQRGNFIYKVTFNEESKKFTTIENLGEENQ

SEQ ID NO: 4079 - protein, 205 aa, Enterococcus faecalis
DPLVGASRDEVERYMITEFLQSLHEEQQASASVIRMISSLRGFHQFLRQERLSEHNPMQHIDSPKKVQKLPSTLSVDEVTRLIETPDTSKPLGMRNRAILEVMYATGLRVSELIEIKLGDLHLSIGLLQTIGKGDKERIIPLGDYAIQWIERYMNEARPQLIKNHPNETHLFVNHHGEPLSRQGIWKNLKQIVREAQIEKNMTPH

SEQ ID NO: 4080 - protein, 322 aa, Enterococcus faecalis
DSLWSNYLRDYGAKGGIKLLQALQCESLCFGTDSTSAIDYAAFGQFVQENQSLIDQTFHALTDKQLSYPQKMTAVFRQVYPESRFDFSSPNHILGMSYAKENATYPTPMTLYPIARKQAGFHDATISGKVASATAIRQSVFQQEITQVLPTVPSITAQHLQTQTMISWENYWPFLKYKIVQSSLEELQAIYQMTEGLEYRLKDQIQAAGSFHELMERMKTKRYTWTRLQRLATYILLNMTKEEVETVWQNSYLHVLGFTPKGQAYLKETKAQIQLPVISKVSKENRAMLSLDIRANQLYQMGDSSLKEQNFGRFPLRFSPDT

SEQ ID NO: 4081 - protein, 255 aa, Enterococcus faecalis
TRDKILTTNQRKRSENMGRKWANIKEKKAAKDANNSRVYAKFGIEIYVAAKSGDPDPHANQKLRFVIERAKTYNVPKHIIDRAIEKAKGSADEQYSELRYEGFGPNGSMVIVDALTNNVNRTAADVRAAFGKNGGNMGVSGAVSYMFDNTGIIGFAGDDADEILEYLMEKDIDVRDVVEEDGQIIVYTEPEDFHHAQEALKEKGIEEFTVTELEMVPQNEVTLEGDDLGNFEKMLDVLEDLEDVQKVHHNVDLPE

SEQ ID NO: 4082 - protein, 156 aa, Enterococcus faecalis
  MISC_FEATURE (59)..(59): Amino acid 59 is Xaa wherein Xaa = any amino acid.
ALGSTKMAYETCAFVYDEVMDESLYQKWLDFSNRHLPQGNQQILEMACGTRALAVDFAXSGYDVTALDLSEEMSMIASERAFEEEVPVQFVQGNMLDLSEVGTYQAITCFSDSLCYMANRPEVQQVSDEIYPALEEEGSFIFDVSSTLQIESVFPE

SEQ ID NO: 4083 - protein, 70 aa, Enterococcus faecalis
EGTIIDSQKILEIAVKAADSKRAEEIVALDVREISLLADYFLICQANSERQINAIVDEINEQEAKNQVEV

SEQ ID NO: 4084 - protein, 206 aa, Enterococcus faecalis
TIFKRRDCIKMSWITNYDAAQRELLMQKVQMQMSERRFRHVLGVEETAVALAAKYGADEAKASIAALTHDYAKERPNDEFELIIRRDGFDLALLNYGNEIWHGLVGADIVQRELAIDDEEILQAIRVHTTGAAKMSLLDKIIYVADYIEPGRDFPGVKEAREIALVDLDAAVAYETIHTLLHLIEQEHKIYPKTLETYNQWVVNQK

SEQ ID NO: 4085 - protein, 220 aa, Enterococcus faecalis
TMGEKRQARQGADVLLQEEPLRFQTRKQVGLLGGNFNPVHLAHLVMADQVQNQLGLDKVYLMPTYLPPHVDEKKTISSEHRLAMLELAVADNPCLDIEPIELIRKGKSYTYDTMKALKEANPDTDYYFIIGGDMVEYLPKWHRIDDLLHLVQFVGIRRPNYPTESTYPIIWVDVPQMAISSTLIRQKVKSGCSTRYLLPENVINYIQEKGLYQDELDNKL

SEQ ID NO: 4086 - protein, 116 aa, Enterococcus faecalis
KSINLNFREKANNLKLRGKQKRYLRSQAHHLQPIFQVGKGGLNDAMITQIDEALEKRELIKITLLQNTDEVAEEVAEELTAAIHCDVVQIIGRVLVLFKPSSKEKYQKISAAVKEI

SEQ ID NO: 4087 - protein, 153 aa, Enterococcus faecalis
SLIDTPGIIHRHQMAHYLGKKDLKIIAPQKEIKPKVYQLNAEQTLFLGGLARFDYVQGAKSSFIAYVSNDLKLHRTKTATADAFYEKHVGGLLQPPRADEVAEFPELVRFEFSVKEKTDIVFAGLGWITVTEPGVVAGWAPKGVDVLRRKALI

SEQ ID NO: 4088 - protein, 583 aa, Enterococcus faecalis
RGDHGQLGVDREMVVLWLLLYRLFYYIIPFLIGCLFFTKHLSQKLDTHYRQLLKQITLEIAHKLQVVLLYFSGIMMVLLATIPEAFTQVHWLRDINPFRSHIIIQIPSIVLGFALLIMGRGIADRVKRAYYPTIILLIGAILYSFVVDFSMFSIFYLAILLFIVIFSKSELYREQLVYSWEWMTIDGFIFGLLTLLYLVIGVYNLPNFPHHRHHFVEFFLFPSERIWLSGFIAILLVMSFNFLFVRYLQGKKHQVGEFPEDSILHNILTTYGGNIDSELVFLHDKQVFLYPKEEPTVFLQFNTINNKCVVMGNPSGNKEDFPAAIDAFLKETDRFGYVPVFYETNEDSVMLLHEYGYEFIKMGEEALVNLETFTMSGKKFKGTRAVFNKITKAGYSFDVLQPPFSTEQMHELKAISDSWLDNRKEKGFSLGFFDEAYLQRNPIAVVRNAEGEMVSFANIIPSYTNEVGTIDLMRHHKEKAPSGSMDFLFIHLFEYMKTENIHYFNLGMAPLANVGQSRKSFIQERIAALIYEFGSEIYSFQGLREYKEKFASKWQPRYTLYSKSSWIVYVMIALLIVDQKNID

SEQ ID NO: 4089 - protein, 61 aa, Enterococcus faecalis
  MISC_FEATURE (10)..(10): Amino acid 10 is Xaa wherein Xaa = any amino acid.
QSVASLGLVXETSYTNVERIEQELAYAEEIFAKYGIPVIDVTAKSVEETAFLIKEKLDERN

SEQ ID NO: 4090 - protein, 174 aa, Enterococcus faecalis
TIIYSLKRVNRYDKLILVRNLRIGRVRKMAKKRNLTKAKILESARNLAEELGVQQLTFQNLAVDLGIKYPSLYNHFKNIAEVKNALVDLLIQELNDALRRALVGKSGAEAIRIYAETYQQFAFENSAVYELLISVPKTQNQQLIEGIHETNQIILQLLAFYPFNNEERLHKSRE

SEQ ID NO: 4091 - protein, 183 aa, Enterococcus faecalis
FVNIIFERRLFGMHITNRSHLADRYGKRTSAEFLLHERRILSFPISLAAIPKEARYLSWELIDYDTIPLIGFPFIHWLAANVPVTNEIPEDFSRTALKPTIQGKNSLASPLGKQMIPALATETLPELTERYLGLSPRSGVHTYTLYVYTTKNPLNLKEGFFANELHQALNDQLLAKAKFEFLY

SEQ ID NO: 4092 - protein, 415 aa, Enterococcus faecalis
GNRMYELIKSKIFRPRQPWEKNLLVLWFGTFMAGIGFSLVMPFMPLYINTLGTFTHQQLNFWSGITFSSTFLVTTIVSPWWGRLADRKGRKLMLLRASLGMAIVISLMGAVTSVYQLIGLRLLQGVFSGYISNATALVATGTPKEKSGQVLGTLATGSVTGTLLGPLLGGVTASIFGYRPTFFITGTILLLVFVLSLVFVHEEFVPIEKNQAASGKQILKKLEHPHVILGMFITTLIIQASNNSISPIISLYIQQLLGGHGNVTLISGVIASIPGIATLIAAPRFGRLGDRIGSERILTIGLILAIFVYLPMAFVQNVWQLAMLRFLVGISDACLLPAVQTLITRYSPSDAAGRIFSYNQSFQATGNVIGPMIGSSVSAAFGYRGVFISTSCLVLLNLLWVRRSTAELKKEKNDD

SEQ ID NO: 4093 - protein, 606 aa, Enterococcus faecalis
  MISC_FEATURE (17)..(17): Amino acid 17 is Xaa wherein Xaa = any amino acid.
FTEGKGSSPSGETSIHXFLASGKVFMCRRCARVCQLRQGRDVLSIANRGFETKMMPSYGQAFDQSICESCGNCVSSCPTGALTAKDTKEYRKWETQKIPTTCPHCGTGCQMNLLVKNNRLVGVEPLDGPANKNLLCVKGKFASYKFVGSGDRLTEPLIKRNGIFEPASWEEALTLVSSKFNEIKAENGPDALAGFSCSRATNEDNYVFQKMVRAAFGTNNVDNCARVCHSASVHGLAQTLGSGAMTNPIADITEDVDMILLVGSNPEEAHPVIGAQIRQAIQRGTQVVVVDPRKINLVKDSALHLQVQAGTNVAFANGMMHVILKEGLADRHFIEERTEGFLDLEKMVADYTPEKVAEICHIHPEDLIQAARMYAKAEKAPIIYCLGVTEHSTGTEGVMSMSNLAMLVGKVGKPGCGVNPLRGQNNVQGACDMGCMPYDFPGYQKVNNPEVIDKFEKAWHVPLNRNTGLTSTKVLPAATAGSVKGLYIFGEDPIVTDPDTGHVRQALESLDFLVVQELFMTETAAYADVVLPGISYAEKDGTFTNTERRVQRVRKAVEPRRQAREDYEMFCEVMTRMGYPCAYESAKEIMEEISAVTPSVWVEIKL

SEQ ID NO: 4094 - protein, 60 aa, Enterococcus faecalis
VQILPPQLLLFFKAYICIKQKRIGLVVQLVRMPACHAGGRGFESRPDRFWLGSSVGRAMD

SEQ ID NO: 4095 - protein, 155 aa, Enterococcus faecalis
GGNAMKIGFIGAGSMGGAMIKGLLKAEAVKKEHLYVKGGSSGTAEALQKEWGFQLVTDYALFQECKVIFIATGAKVVLPVLQELAPHFSNESLLISVATGHTIQEAQMALGNKEAKVVHAIPNTPVSVNQGVIGVALAPTIEGQTKDLAMELLAS

SEQ ID NO: 4096 - protein, 608 aa, Enterococcus faecalis
KSFAERKRYNFPFLNEYPMLYLKSKNKKTNEVFSMSWEQVYQQWLDEENIPENLKNELKDLNTDPEKCEDAFYAPLEFGTAGMRGILGAGINRMNIFTVRQATEGLARFMDTQDPETKRRGVAIAYDSRHMSPEFAMEAAKTLAKHDILSFVFESLRPTPELSFAVRYFKAFAGIMITASHNPAAYNGYKVYGEDGGQMPPADADALTKYVRSIENPLKIDVLSDEEVAHSGLINIVGEEVDNAYLKEIKTVTINQELINEMGKELKLVYTPLHGTGKMLGEKALKQAGFEKFVLVPEQAVADPAFTTVKSPNPEEHSAFEYAIRLGEKEGADLLIATDPDADRLGAAVRMPNGDYQVLTGNQLGSIMIHYILEAHQQAGTLPQNAAVLKSIVSSELATAIAEKCNTKMFNVLTGFKFIAEKIQQYEEDHSQTFMFGFEESYGYLVKPFVRDKDAIQALVLLAEVAAFYKKQGKTLYDGLQDIFEEFGYFEEKTISVTMSGIEGSGKIKALMAKCREQAPTEFAGIQVAQTEDFKELTRTFADGQTEQLQTPPSDVLKYHLEDGSWIAIRPSGTEPKIKFYLATKATSSSEASEKIAAFEAVVNELTK

SEQ ID NO: 4097 - protein, 61 aa, Enterococcus faecalis
DWQVFLREGVLVAPSVAFSEKRGSIRLNCSRISPEEMPLFCERMVRITRQLSENRQTKIEQ

SEQ ID NO: 4098 - protein, 305 aa, Enterococcus faecalis
SPLWAVETLANGRLEVIPSFDFPALNWKQFLKEEAQDELGYLPLRKEIQAITATEYQLHLPSESLLLTSGAQQALFLVLQVLLRQGDSVAVEDPSFFYALPIFQAAGVRLFGVPMTEEGIDLEALEQTIRQHRIKMVMVNPSFQNPTGTVMPLRKREQLVKVCQTYQVPILEDDVFGQLSFIPKTEIPPLKKLDPDNVLYIGSLSKILGSTTKIGWLSAPASVTKQIAEARKMMDVSLSIFPQMLAKMAIEDPSFSEKITLLNKQVEQRATAVYQVFKSLSEWEVSPVKGGFYLWAHWRQGALKP

SEQ ID NO: 4099 - protein, 373 aa, Enterococcus faecalis
KRWLLCSINEANERRTPMMEKQPTTKDVWKNDQWVRPFLKRYKKTLYFALLLGFLTFFSAGALMFTSGYLISRAASLPENILLIYIPIVLTRAFGIGRPVFRYVERLTSHNWVLKMTSDLRLKLYNVLEKDAIFFKTKYRTGDILGLLSEDINHIQNLYLRTIFPTVIAWILYIFLVIALGFFSWWFALCMLLMLGVVVFLLPLVSVIVNGARQEKHKYAKNELYQTLTDNILGVSDWVFSQRGSEFVARYETDEANVRALDEKMKQFNRGRDFVLQLLFGVIAIAVLAWTSVRFPGNHGGAANWIGAFVLTVFPLIDAFAPLPAAAQETTIYKDSIRRFNELPEGEDDSTEAPVQPNGTGLWTEHLSPAYEL

SEQ ID NO: 4100 - protein, 438 aa, Enterococcus faecalis
PTRGEDVAFVFTQDIRSGITLLIVFPIIIIFMIVLGYAAQSKADKQYAAFQMLSNHFIDSLRGIDTLKLFGLSKKYAGSIYHTSERFRKATMSTLKIAILSTFALDFFTTLSVAVVAVFLGLSLLNGTILLFPALVTLILAPEFFLPIRDFSSDYHATLDGKNSFQAIQAVLALPEAEQTDVLTLDDWHQESQLSVTALNFSYEDATQEAIQSLQFSVDGRKKIGIIGASGSGKSTLINLLSGFLLPTEETSQLAINGQTIPHFLQKDWQKQILYIPQAPYIFQDTLANNIRFYTPEATDEAIQQAIQLVGLDELVKDLPEGIHTLIGESGRMLSGGQAQRVALARAFVDQKRHVLLFDEPTAHLDIETEVEMKERMLPLMNNHLVFFATHRLHWMEEMDYILVMEKGQLVEQGTLAELIEKDGYYVQLMKQMRGGRQ

SEQ ID NO: 4101 - protein, 268 aa, Enterococcus faecalis
LPLVRTVLSLLLTPLVKLLAFRIGAYDAPGERRINTKNMPTAGGLAIYIAFASSCLLIFRSIIPQDYIWPIILAGGMVVLTGLIDDIKEITPMKKTIGILLAALVIYFVAGIRIDFVTLPVVGMIDLRWFSLPLTLLWILAITNAVNLIDGLDGLASGVSIIGLTTIGITGYFFLHAKTVYIPIVIFILVASIAGFFPYNFYPAKIFLGIYRGVIPRVYDCSNVVTGLEKCYVYYGNYANGDFRCANYGYGLCNYSTAIEQKAHFLSK

SEQ ID NO: 4102 - protein, 160 aa, Enterococcus faecalis
AYTGALFLGFMIAVMSLQGLKNATFITVITPMVILGVPITDTVYAIIRRLLNKKPISSANKMHLHHRLLSLGFTHKGAVMTIYALALVFSFVSLLFSYSSTVASILLIVFCLIGLELFIELIGLVGEGHQPLMYLLRILGNREYRQEQMKKRLGKHSKRK

SEQ ID NO: 4103 - protein, 264 aa, Enterococcus faecalis
GEMSMQEMVTISIVTYNSRYIFNVLDQLKAELGTDSIYDIHIYDNHSETAYLEKLTTYEPFITIHRAEENQGFGHGHNQVLFNASTKYAIIFNPDVLVTKDVLDRLLNRIKIDKNIAVVSPKVLNEDGTTQYLVRQKLDVFDYMLRFIPFQFVKKIFDKRLSIYECRDLSDTETTDIKMGSGCFMLIDREKFVEIGGFDERFFMYFEDNDLCLRFGKAGYRILYTPFETVVHMYEKGAHKSRKLFKIFMQSMGKFFNKWGWRFF

SEQ ID NO: 4104 - protein, 253 aa, Enterococcus faecalis
QMGLEVLLMSQRLEVVIVLYQMKMADTPNYLLLKEVVDHPELHLFIYDNSPLPQEDALFLQQNVTYRHNPDNPGLATAYNEAIAFSQTNQCELLLLLDQDTEVPASYFDTLIIMPLDPTVAVYVPIVEANGQQISPVYSDQYVGLKGAKPTAGIANQPLMAINSGTVITAETLRWLEGFSEEFPLDYLDHWFFYQLNQANKKIEVLPIHLKQELSVLDYRTMSPQRYRSIIEAETLFYRRYDQVAICSQTGYG

SEQ ID NO: 4105 - protein, 97 aa, Enterococcus faecalis
GGPPHPVDKTLSDLSKQGGIPIVSITQDEKSVIGEKSDIVLQTSSGEDVPLRTAATVSLVAQLYVVDVSFFAYAAKNYKETLEKILISRKNVERVKE

SEQ ID NO: 4106 - protein, 243 aa, Enterococcus faecalis
RNLGGVAMTEATTLYIIRHGKTMFNTIGRTQGWSDTPLTKQGEEGIYHLGLGLRDIDFKEAYSSDSGRAMQTAQIILQEHQNHQKIPYLTDKRIREWCFGSLDGGYDGELWGVVPRILAFKSYEDMMTTKITYRELANAIIEADTADWAEPYEVIRDRVWSGFEDIAHHRDKNGGGKVMVVSHGLTISFLLSSIDASLLMQMALEYVSVTTLTYEKGTFTIQGINDIFYIEKGKKIAEKRGLL

SEQ ID NO: 4107 - protein, 225 aa, Enterococcus faecalis
DCLVYLERIVRTLGGPEMIQIEQIRTGVIQENCYLVYNEEALLIIDPGAEGAKLIQEITRLGKKPAAILLTHTHYDHIGAVEELRHHYQIPVYVSPLEQAWLSNPILNLSGLGRHDDIANIIVQPAEHEFKLTDYEIGGMKFSVVPTPGHSIGSVSFVFDDFVVVGDALFKGSIGRTDLHTGDMQQLLHSITTYLFTLPEEFPVYPGHGDATTIQHEKATNPFFN

SEQ ID NO: 4108 - protein, 461 aa, Enterococcus faecalis
MFHFVIKGTGFSSKNLQEIKVYEETLFCIDEAGVIQEIIEPDAEAYETVLAEQKEAQRFQELPQDSYLLPGFVDLHVHAPQWAQSGTALDIPLYEWLNTYTFPLESKFADLAFAQQVYDELVTQLLANGTTTALYFATIHYEASRRLAEICAEKGQRGLIGKVVMDDLNENPEYYRDQTTQQALEETERFIQEIQTLAQQTKQGVYPVVTPRFIPSCTEEALKGLGELAAKYQVHVQSHCSESDWEHQFVQERFEKNDAQALNDFGLLTEKAVMAHAGFLEEADMNLFHETGTAVAHCPISNAYFGNAVTPIAKLVHQHQVEVGLGSDLSGGFSPSLFDNLKQAVISSRMLEDGVDATKKPEVRGVKTARITVNEAFYLATAGGGQALSLPIGKLEKGYAWDVQIINTSLSQARIPKNPGESLLDIFQKILYLARPENIREVWVQGEKVHDKNLMSATKGV

SEQ ID NO: 4109 - protein, 77 aa, Enterococcus faecalis
KMSEKKQNNLHLTVGPEDSVSFGQATMLGIQHVLAMDVYVVPVIIASIIGISTAQTSSLIQATFIAAGVASPHNGNG

SEQ ID NO: 4110 - protein, 151 aa, Enterococcus faecalis
CRTHEFYLKNTALKGALMRYPVVIHPNEHLKMKAQPVTIITDEIVQLLEDMYETMLAHDGIGLAAPQIGKNLQMAVIEIDEESGRFELINPVIIEKKGTSIDVEGCLSIPETYGTVERADEVTVRYFDREGEEMEVTAYGYFASRTGVWQR

SEQ ID NO: 4111 - protein, 93 aa, Enterococcus faecalis
  MISC_FEATURE (17)..(22): Amino acids 17, 21 & 22 are Xaa wherein Xaa = any amino acid.
SSETNVSNRDEIKTRLXFKIXXAPPAQKGLKFLLGPTPNAIMRVNNRYFYQVIIKYKQEPMLQPLLKEILTDTQRATARGLKLSIDAEPMNFI

SEQ ID NO: 4112 - protein, 93 aa, Enterococcus faecalis
  MISC_FEATURE (89)..(93): Amino acids 89 & 93 are Xaa wherein Xaa = any amino acid.
LLTQVSGRAGRAEKPGEVIIQSFNPEHYAIQLAKAQDYEDFYTKEMYIRHRGDYPPYYFTVQITASHPEENEAAKQMFQIATKLKQGFXLKFX

SEQ ID NO: 4113 - protein, 200 aa, Enterococcus faecalis
SCGREIKGGHFVVKKIWQLVCLENNYDSHSSYFRDMVRYFSYTLLALLLFFLGLYFNIGWVSGFCFVGLILLPYMGFLSRDNYREFAPRVWKIRDVRELEELYPVVVDRVRDRLLFYEKKLYLKGDSLKHADSMKGGFVLSEISLENELIFNASIAKKSCIVVEEYVYENVNFKEEFQNKKNQEAPVLRYIVYTNNFLSE

SEQ ID NO: 4114 - protein, 205 aa, Enterococcus faecalis
IMSREFIERNTKVAISITEKMKKGKNDLQKTKEKIVQLDEQGELTIPYLKITFEKFSESNEELLKEISRYEYTYVVHEAEMAVKEKAIWEEFFSIKKLYDKELSEFASFKEKYKYFEPKNSEELKKQARVLLEKKGYIVDSPFEGDFERWIGVYARPKDKPTYLDPTDGEEAGLQELYSVDGFKQDFAEWFEFEVVEGKLKEDIL

SEQ ID NO: 4115 - protein, 91 aa, Enterococcus faecalis
VCCERHLYGQNLRWLSNYLAPSLKMIKEIDHLLGTNELMERIDLAELKEKHEEIIEMVCVDAKDLLFTTNQNSSVRSYMEQEFDLEEVYPF

SEQ ID NO: 4116 - protein, 147 aa, Enterococcus faecalis
KNPVSHAGYGYAAEVAILDDKGKVAKFVAAYDMGQVVNPRAAEGQIEGGIAMGMGYALTEKFALEEGYVKAKYATLGLVNATQVPPIETILVHADNLHEGLAYGIKGVGELATIPTAPALAGAYFALDGQLRPSLPLENTPYQKKKR

SEQ ID NO: 4117 - protein, 208 aa, Enterococcus faecalis
KIPLIKRKKDKRRQLMSLVSVIILASGNSQRMGQNKLFLKYQGKTFLEHTLTLVNQLDVLERILVVSPENQPAFPLPKNIQLILNHQWQEGQSSSIRLGTEQARGAGYLYLPSDQPLLTPKMLQLVLDKCQRNKIVVPLQKDGCPSSPVLFGNQFRQELLTLTGEKGGRMIYERFPEAVQMLRIATPGRLKDIDTPEEYQKLIQETNS

SEQ ID NO: 4118 - protein, 137 aa, Enterococcus faecalis
FKKPIVREEKRMKDLVYLNYAATSYKKFPATIEALTAYLAENQFMNYGRNAPLLREGLPLLETRQLLADFFQAPSAAQITFTNNATTSLNLALAGILQPGDHVITTMLEHHAGSFKGKKKPPFSPLFFPPQKPFFFF

SEQ ID NO: 4119 - protein, 63 aa, Enterococcus faecalis
KLKGGPHLAPQMVSEPIQKLNEANGPREFPKTGTTKTPFMLIAGILASTFAVLGVSYLQIRKN

SEQ ID NO: 4120 - protein, 366 aa, Enterococcus faecalis
MTKKIWSHFRKSFTWYILIGVIVSLCSALAIYFFQQLLDHYQKSFQLGLLVAYGTTIILIPLLSYCEQKPKAYLTNGIYFYLKKLSLIKMSKISYEEYLKLGAGALLQKVEVGAAAGRNIHLNFYGRLFRELIPETLFNLFFIALIDKKLLPAILIGYVIVFILTKILLKTLQKMKEKTLISEEAMNATLIRGMTELVTFRINRKYKKEIENYALMAEENSQNITKMTMIHEFFFGFFALLVALIKVSIVVLSFTNVVTLSLGGLVAIVMYIDRIYTPIAIFNVLFVQYNLDKVAYQRLEDFYKKEDDPDLAVSGKALPEIQTISLKDVCFSVDSQTIMSQQNRQFSMNKTYGLIGKIGTGKSPLN

SEQ ID NO: 4121 - protein, 166 aa, Enterococcus faecalis
IKLSLGLLKPTEGTVYVNQFPLTQFNLEDYYEKVFYLSQDVPIFQGTLKENIVFNQEISDEQVIEAMYRFQLGELYERLPEGLNTIVSEKGMNFSGGEKQRIAFTRLAFTQAEILILDEATSALDEKTEEKVLQEVQKFTHNKLTILVTHRPKTLRFVDEIIDLNE

SEQ ID NO: 4122 - protein, 145 aa, Enterococcus faecalis
LFGASFATLFIRIERKGQLLMNNNEQELAEFWDEFAEEYEEIQQESPFPIARELRDFLVQEGIFPCQTFLDIAGGTGRYLPFFQEQVTEYTLADISQRMLEIAEAKAQSNVVFLHQSQERLIETGKKFQVVFSAMNPALDTPGKS

SEQ ID NO: 4123 - protein, 104 aa, Enterococcus faecalis
TLLWIRREKVNALCQLSEEWCLIFRLVEEQDSLFSPFEQESNPQLKWMAQYKAFLKKEQRPFFTKKFFFEASEAISKDFFRSYFEEQWSVPILEQRVPEIFGFS

SEQ ID NO: 4124 - protein, 158 aa, Enterococcus faecalis
LFVFSMFHLLLLLLCYFCKLLGGEKMKKIGAILFIGLFIVGGYTGYRYYADTYKGEKAYAQVPLEIPERKQTVYDNQKSIDGQYSLHYRLTFVKSNGKTQVMDYERTDKNPQPLEPNAYIEATISKKRIIQSPVKIDKKEIPEKAFAQLNNRKTTSDN

SEQ ID NO: 4125 - protein, 130 aa, Enterococcus faecalis
RRTIDKLGVLNKHQVPQRSVFFCASVLYLGVILSYFVGDELFGYLTGSLSYTVLLIWILISAAAFVLSLKRGSLFEKSINLLALIILGLIFIGILFTNSLGVTLLTGLLYFVIFFSYRKKNDSFLLSDES

SEQ ID NO: 4126 - protein, 65 aa, Enterococcus faecalis
LKKITKYSRPVKRVTPNEFVNKMPIKMRPKMINARRLILFSKRDPRFKDRTNAAALIKIQISKTV

SEQ ID NO: 4127 - protein, 89 aa, Enterococcus faecalis
EMKKNSKYLGSITVIYLLVLVIETLWELFHTSRTESTKVTTLLGITIDNRISKHEISTTFGLTIKVLVLYLLLLLVVYILTGLFGKKKI

SEQ ID NO: 4128 - protein, 143 aa, Enterococcus faecalis
GISTLFVVIVSCLYFDWVIWKKENMIIKLSILYVLSIYVVLLVHEWLHFILAKFFKYNAYIKRVGLYPFKVVYTNRNNPLDNLLISAISPLFLVIVGIILPLNYYTVILKVSCISNIFNLLPFTADGEIILLSIFQIFRRRNK

SEQ ID NO: 4129 - protein, 172 aa, Enterococcus faecalis
MKKRKVFIIFLVSLIIFVFGYYLAFNQNKYVSYNDETKQFVHTDTSKIMENLVNRQQGIYYFGFPTCPWCLELLPILDKELEKESMNAYAVNTRGDDYTENDDELLQKFYQKYTGDESLSVPFIVAINNKKEVQVHIGTVKNHDATKTKLKRRQKEELSQSLNEMLIFSESE

SEQ ID NO: 4130 - protein, 63 aa, Enterococcus faecalis
LNAFFIVSCWYVYSKNSEKTLLRFLFFYGVAVADLIAGEVIYLFFLKNNENTVNNRLFLNRTI

SEQ ID NO: 4131 - protein, 129 aa, Enterococcus faecalis
IEPFKKSEKKSIMKQGVNKCKGMWRMDNQLTTELKERYGIVFHDVNLLEQAFTHSSYVNEHRYLKLSDNERLEFLGDAVLELIVSQYLYLKFPELPEGKLTKMRAAIVREDSLAKFAKECHFDNYILLG

SEQ ID NO: 4132 - protein, 275 aa, Enterococcus faecalis
NYCKTKEGIELKNSEEHEPKQRHHLIEYANGPSLEEINGTIDVPKNMSFWKTLFAYSGPGALVAVGYMDPGNWSTSITGGQNFQYLLMSIILISSLIAMLLQYMAAKLGIVSQMDLAQAIRARTSKTLGIVLWILTELAIMATDIAEVIGGAIALYLLFHIPLGLAVFITVFDVLLLLLLTKIGFRKIEAIVVALIVVIFVIYVYQVALSNPVWGDVIKGLVPSAEAFSTSHAVNGQTPLTGALGIIGATVMPHNLYLHSSCCAKSVFTTRLSPQ

SEQ ID NO: 4133 - protein, 174 aa, Enterococcus faecalis
IKQQRNLFRRKEIMMIIWLNGAFGAGKTTIAHELQQKLPNAIIYDPEIIGSALMELVPEEMKENDFQEYQEWRCWNAHLLKRMSKESGRPIIVPMTLYKNEYEEELIGYLRRAGIDVYHFLLAVEKEEILQRLLKRNDGTFEWGKNKLPEVLEVFVRFSLPRFLAIIQLTRQKL

SEQ ID NO: 4134 - protein, 75 aa, Enterococcus faecalis
KRFDGDKKSSVLLGVARNSSEGRVWRGRFIFSQEKTMIKMKMPKMMSKVRFPILLASRVFFLDDAVTAFNLKTSN

SEQ ID NO: 4135 - protein, 286 aa, Enterococcus faecalis
LEVFKLKAVTASSKKNTLLAKSIGNLTLLIILGIFIFIIVFSWLKMNRPLHTLPSEEFLATPSKTDDFLSPSNLFYFSIRTMFRMIVGMAWSFLFSFVFGILAVKYKTARRVILPLVNFLESVPLLGFLTFTTAWLLGLFPGNVMGAEAVAIFAIFTGQAWNIMLTLYQIMEVIPSDLVNVTDQFKYNAWEKFWRLEFVYSIPGLLWNVIISQTAAWFALVANEQASVAFPKETNLYLPGIGSYIQVALNRADFKSCLWAVFALLINVVILNFLVFSTFSSSHLLF

SEQ ID NO: 4136 - protein, 82 aa, Enterococcus faecalis
PVKMAKIATASAPITFPGNKPSNQAVVKVKKPSNGTDSRKLTNGKMTLRAVLYFTAKIPKTKENRKDQAIPTIIRNMVRIEK

SEQ ID NO: 4137 - protein, 311 aa, Enterococcus faecalis
FEPLIILNMETDVESTTPPKSIIYHLLKKATLTKYFSKAFVKFSHFWIYDLPKVWYFFKLDYFYRLLAKLRHFFKTLWYVSLTIIGVYCSIKLYHFLPHQDFSMIPRLTLYTTLRVTLAMVVAGIIFTPLAIWVANDNRRLSIVQPIGQILGSIPSNVYTPFIVLIISMGFNKLEWWILPLIMVGCQWYFFFNVIAGYLAIPDDIRDVTKLFKLSKWQWWTKFLIPSILPYLITAIINAAGAAWNADIAAESIQWGKKSIDVTGLGQYIAANDGVKDKSALGTLAMCFVVGLCIAFVWQPLYRAAKQKFHY

SEQ ID NO: 4138 - protein, 124 aa, Enterococcus faecalis
  MISC_FEATURE (124)..(124): Amino acid 124 is Xaa wherein Xaa = any amino acid.
VISLDLSNKTMENKELLSIKSVYKEFEIEGHSEHLKVLENIDLTVKTNEFLSIIGQSGTGKSTLLRSIAGLLRTTRGEITFEDKIINEPDANIGMVFQHFALFPWLTVEKNISFGLENRKEISX

SEQ ID NO: 4139 - protein, 383 aa, Enterococcus faecalis
KGKTTAAYFTKYILDVATQQKTALLSTMNSTLDGKTFFKSALTTPESLDLYRMMATAVANGMTHFIMEVSSQAYKTNRVYKLFFDVGIFLNITPDHISPIEHPTFDDYFYCKRQLITHSKVIVLNHEADYFPLLKETAQQQKVPAIVYGSQPAPEVDYSFAVSSEDSLRFIVESPADALGLAGSYHLRLGGDFNKGNALSAAIASVLVGASKEECQQGIAATTVPGRMESLTNTNGATVYVDYAHNYDSLKNLLTFVREEHPDGRLIVLVGSTGDKAISRRKDFGRVLSELADVAVLTTDDPASEDPAKICQEIQAHITKEMPVYTVLDRGEAIAHALSLSTTADDAIVLAGKGADLYQKVNGVDEPYAGDFALAEAFINKKN

SEQ ID NO: 4140 - protein, 190 aa, Enterococcus faecalis
MKQFFQKGSKPNQLVVAFHGTGGNEYQLLTTIATLYPEASVISYLGTEGVGEQRRFFAPLVNGALFRANFDERVTAFIEEVWQPQKLYDEVIFIGYSNGANFILGLLEKNPTIANTVILLHPSNLGYQYVSGEFATKVIVTTGAQDELSIPGQVLSLANQLKKHFPVDFLLVDGGHGLSEEEVTKIKEVL

SEQ ID NO: 4141 - protein, 328 aa, Enterococcus faecalis
  MISC_FEATURE (326)..(326): Amino acid 326 is Xaa wherein Xaa = any amino acid.
LIRFRPFLKKLFHLINLQERNFTMYAQIHHISILNRLIKPTFDFYHNTLGLKLLMKTINQDDHTMYHLFFSNNEQRTGTELTFFELNDGQDQSFGTNTIERTILKVPTRASLDFWAERLEQAGICHYGVETFNQHPILRFEAPDNTQMALVPLREFENAEDYFPAEHSEIPVEHAILGIDAIQLRVQYAVATKQPLVDYLHWHEKETVPFFETAHEVTVLENHHPQFYQEVHIIDDRTNPLAIEGIGGVHHVAFGVEDTQELTQVDSLLEEKNFTNSGIKDREFFKSLYFREPNHLLFEVATQKGLLDAEAYENQSSKCLDSPFIXLT

SEQ ID NO: 4142 - protein, 712 aa, Enterococcus faecalis
KRQNNKREGSFMNIEKMTTTLQEAIAEAQKVAVTRQHQEIDIAHLWKIFLQPNHFGRNFYTDAGLDVDAFEREVDNALDEYPSVAGGNVQYGQNLSQNLFHLLQEADSLREEFQDEFLSTEIVLLALMKLKNYRLTKYLMQQGITEKELRKNIEEMRGGDRVTSQNQEEQYKALEKYGVDLVQQVKAGKQDPIIGRDEEIRDVIRILSRKTKNNPVLIGEPGVGKTAIVEGLAQRIVRKDVPENLKDKTIFSLDMGALIAGAKFRGEFEERLKAVLKEVKKSDGKIILFIDEIHNIVGAGKTEGSMDAGNLLKPMLARGELHLIGATTLDEYRQYMEKDKALERRFQKVLVKEPTVEDTISILRGLKERFEIHHGVNIHDNALVAAATLSDRYITDRFLPDKAIDLVDEASATIRVEMNSMPTELDQVTRRLMQLEIEEAALKKESDDASKKRLANLQEELADLREEANSMKMQWETEKEEVNAVSNKRAEIDKAKHELEDAENNYDLERAAVLRHGTIPQLEHELKELEEKNAKDNVKMVQESVTENEIAQVVGRLTGIPVTKLVEGEREKLMKLNETLHKRVIGQDEAVDAVSDAVIRSRAGLQDPNRPLGSFLFLGPTGVGKTELAKALAEDLFDSEDHMVRIDMSEYMEKHAVSRLVGAPPGYVGYEEGGQLTEAVRPKPLIRLVFFIRNEERTPKVLISITSLEDSR

SEQ ID NO: 4143 - protein, 217 aa, Enterococcus faecalis
  MISC_FEATURE (215)..(215): Amino acid 215 is Xaa wherein Xaa = any amino acid.
EVWKISNENDIFKKRKPLPPKKSEESQPELTPWQKQNQEYLKKQAEEAASKGENEQAEVTITLQEQSQEEPQQHLPQETVEEEEHFADRLPNVKKTRNKRLYRRLAFILTCLGTAILVALYFVSPLSRLSEVTVSGNKSVESQAIIQQSKLETGSGLWEQYSNRNYFSANIQKKFPIIKKANIKLNGINSFKIDIQEYQIVALAATKGGYHPILXEW

SEQ ID NO: 4144 - protein, 74 aa, Enterococcus faecalis
IIAWLSTLLLPETVTSLNRLRGETKYNATKMAVPKQVKIKAKRLYKRLFRVFLTFGKRSAKCSSSSTVSCGRCC

SEQ ID NO: 4145 - protein, 370 aa, Enterococcus faecalis
KKVKCEKMKILVTGGGTGGHIYPALSFVEHVKKEAPATEFLYVGTENGLESQIVPKAKIPFKTIKIQGFKRSLSPQNFKTIYLFLTSINKAKKIIREFQPDVVIGTGGYVSGAVVYAAHQLKIPTIIHEQNSIPGMTNKFLSRYVDKIAICFPDVASFFPKEKTILTGNPRGQEVVTVEKSAILSEFGLDPAKKTVVLFGGSRGALKINQAFEQAFPLFEEREYQVLYASGERYYQELQESLKFSEKKLTNISVQPYIDKMVEVMANTDLMVGRAGATSIAEFTALGLPAILIPSPYVTNDHQTKNAQSLVKVGAVEMIPDAELTGARLVAAIDDILLNNEKRQQMATASKGEGIPDASDRLYQVVKTLV

SEQ ID NO: 4146 - protein, 232 aa, Enterococcus faecalis
IGNQVEFQTLAKTTGAKVLPFSTKEAVEGAYLLDGKLYFNEEYIMPADELGIPGSHNIENALAAICVAKLKNVSNAQIRQTLTNFSGVPHRTQFVGEVQQRRFYNDSKATNILATEMALSGFDNQKLLLLAGGLDRGNSFDELVPALLGLKAIVLFGETKEKLAEAAKKANIETILFAENVQTAVTIAFDYSEKDDTILLSPACASWDQYPNFEVRGEAFMQAVQQLKESEM

SEQ ID NO: 4147 - protein, 127 aa, Enterococcus faecalis
GRLSIGENGCAGVYPSMLATIVAPTVGIDVFSLQFILMLVAVVTISSFGVSGVGGGATFASLIVLSAMNLPVAIVGLVISIEPLIDMARTAVNVNDSMVAGVLTSARIHELDRDVLNDRDVVLDANI

SEQ ID NO: 4148 - protein, 94 aa, Enterococcus faecalis
IRALVNTPATILSLTLTAVRAMSISGSIEITKPTIATGKFIALKTIREAKVAPPPTPDTPNELIVTTATNIKINCKLKTSIPTVGATMVANIDG

SEQ ID NO: 4149 - protein, 134 aa, Enterococcus faecalis
LNSKGREGMFSNQVKIMLYVNNVEESSQFWQTFGFVEKERKEVDGTLVVEIAPSESAEAIIVLYDLAFIQKHSPEVAGNTPSLMFASDDIIGLYKKMQEAGVTVGEMVQLPTGLVFNFADNDDNYFAVMGQESK

SEQ ID NO: 4150 - protein, 385 aa, Enterococcus faecalis
AEVSGMRKRHAKKRHGGVNWLFIVCLLVVIGGSGYLIKTFFFTRDSQVSQESKVVLEEDRRSDNYANLTKEIVAPDSGELDQKIQETNYIGSALIIKDDQVLVNKGYGFANFEKQQANTPNTRFQIGSIQKSFTTTLILKAIEEGKLTLDTKLATFYPQIQGAEDITISDMLNMTSGLKLSAMPNNIVTDEEIIQFVKQNTIQVNKGKYNYSPVNFVLLAGMLEKMYQRTYQELFNNLYHKTAGLKNFGFYETLLEQPNNSTSYKWTEDNSYNQVLSIPAASFAHEFGTGNVDMTTGDLYWYLHQLTSGHLVSTALLQKLWTSSQQSSYHGGIYVHDNYLRLHGVEAGQQALVLFSKDMKNWVIMLTNCVNPRHTKKIMVPWSMM

SEQ ID NO: 4151 - protein, 168 aa, Enterococcus faecalis
LTNHIVLFEPQIPANTGNIARTCAATNTPLHLIEPLGFSTDDKHLKRAGLDYWNDVNITYHKDLAAFLAHVAGKHLHLVTKFAHQTYSEVNYNDGEDHYFLFGKETTGLPETFMRENEEKCIRIPMNDEHVRSLNLSNTAALIVYEALRQQNFPNLELTHHYENDKLD

SEQ ID NO: 4152 - protein, 218 aa, Enterococcus faecalis
RDKEVWRSYMKLYFTRHGKTEWNQQKRFQGMTGDSPLLPTSYDEIKQLGQYLQDIPFEKIYSSPLLRAKNTARGIQQELTHPVEIVYTDTLKELGLGRLEGQYIEEMRNFYGEELDHLRHRLDLYDPTIFDGEPIEQAIQRISETVAEAAKQHEGPVLFVGHGAALTAAIQAMAGKPLSELRTMGGLLNNSLSILETKEASRNMPYDLTLWNDTSFLS

SEQ ID NO: 4153 - protein, 124 aa, Enterococcus faecalis
PSFGEDCQTYTTIVSILPEITSENLRPWFFRVTFNYYITMYRKKKRERTFVANSHPVQSIEKMEGQELLLLIDSLKDEEQELVLLKYYYQLSYAEIALILELSVENVRKKLYRTRQKLKKELEE

SEQ ID NO: 4154 - protein, 140 aa, Enterococcus faecalis
KCSQKIVSHTSKIKKRTGGIEVDLKKSIRKAKRKQFIVIGAITVVSFAVLFVGFFVGMDKLSTKNYHTLLEVINDQEMIASPNTQLDSQVIANSSPFGGEVVTNRSKNIDGYTVEWSNLRSRYSFFRNSIDWNEVYPGSY

SEQ ID NO: 4155 - protein, 306 aa, Enterococcus faecalis
KDRSIFMNTFWKSFPDVERSLTETCELIEQTLHTRNEDIEEALVTLARSGGKLLRPAFFFLFAQLGDEEKQEKQQLLKIAASLEILHMATLIHDDIIDDSPLRRGAVTIQSQYGKDVAVYTGDLLFTEFFTLIADAMNGSEFMKINAQGMKRLLLGELDQMSHRFDRRMSIPAYLRSVNGKTAELFSLSCLEGAYFGHSSKEVQRLAKRIGRHIGIAFQVYDDILDYTADTETLKKPALEDLSQGVYTLPLLFAYQAAPDVFSPYLDKGRAITLEEAAEVAALVNDYHGVTEAHAFADQVTNLAVT

SEQ ID NO: 4156 - protein, 305 aa, Enterococcus faecalis
RRDSLNREIFFELVELKAKTASVLPFLLGICFSWYQYGRLHVGYVLIFFIAMFIFNMAVDILDNYNDYHHATEVHDYKEKTNIIGRENLSLPLIRKMIFWMILVSALMGIGLSFIVGWPLLIMGLYCYLIGIFYSSGPKPLSSLPLGEVFSGFTMGFMITLICVYINTFEVFNWSAANLWGIFLVALPNTCYIANLMLANNICDLEEDENNKRYTLVHYLGKASSLKLFVGLNTIAMLAILLAVGLGLTPPTMLLMLLTLPFVRKQTQALLKEQVKSKTFVCAVKILAVGATAQVLFFAIGLWWL

SEQ ID NO: 4157 - protein, 89 aa, Enterococcus faecalis
KIYSHHKPMAKNSTCAVAPTAKIFTAQTNVLLFTCSFSKAWVCFRTKGKVKSMSNIVGGVNPKPTANKMANIAIVFNPTNNFKELALPR

SEQ ID NO: 4158 - protein, 277 aa, Enterococcus faecalis
VCGGCKFFIEWKGIKMNKKHVVILGAGYAGLKTLRELQKGAKDVEITLVDRNNYHYEATDLHEVAAGTQPAEKITYNIMDVVDEKMTTFIQGTVKTIDAATQTVALEDGQTINYDYLVVSLGFESESFGIPGVQEHALQMVDVKTALNVYEHIQEQMRQYKATQNEEFLKIVVCGAGFTGIELLGSLVENKPKFAEIAGVSADQIQIYCVEAVTRLLPMFNEKLANYGVQLLKDSAIHLLLGKLIKEIKPGAFVYQDNEAGDLAELSAKTIIWNNGC

SEQ ID NO: 4159 - protein, 174 aa, Enterococcus faecalis
LKKSNQAHLFIKITKQATWQNFLLKQLFGTTGVSGSHVVGDSGFEARRGRVMVQPDLTDANHSNVYIIGDCSAVMDTETNRPYPTTAQIALKMGAHAAKNIQAQLKGEATKPFSFKSQGSVCSVGNTRALGIVGKTDIKGYPASFMKKIIMNKALFETGGTKEMMAKGRFDLYH

SEQ ID NO: 4160 - protein, 97 aa, Enterococcus faecalis
LLGRIYVMKFIKFLVVTAIVIGGGLFGAKFYAEKNSGELAGVLDQLNPLVKEGNVYVKTKKADSVNGYGIASYTQVAADVEGKNARNNFHKCSHRPG

SEQ ID NO: 4161 - protein, 62 aa, Enterococcus faecalis
ESRNSIIKSIIDRRVVFCYLFKITKIRHKSEEKLVVAPEEGLFKTCYTLEEVTENNYSGGFM

SEQ ID NO: 4162 - protein, 187 aa, Enterococcus faecalis
LKEKRGMKMVRTKVYTKEKILNVAEKILVDKGFSNLTARNIADAMGISTQPIYLEFVNMDDLKRTLIKSLFHRMQLFYKADVGASDPVIALGLNFILFAQKHQKIYTALFMKAHGYEEELQQMLQTFFEERLLLDKKYVQMDKGKFVELFPKMVVIYLGLATAVTMKTIDLTKNQEIQLLSQLLIEE

SEQ ID NO: 4163 - protein, 446 aa, Enterococcus faecalis
RSYFLREKQRRVLFMLDKLTVWIENHLAGPMAKIANQRHLRAVRDGIIATLPLIIVGSFFLIIAFPPLPESWGITQFLTSNAATILLPYRMTMYIMALYATFGIGASLAKSYNLDQVSGGILATIAFLLTLVPVAIPEEASKAAGVSGFVLPMANLGGAGMFVGIVTSIIAVEIYRVTDKSKFKITMPDNVPPAVARSFESLTPTLIVMLLIGSITYYLGFDWHTFVGNLVGPLVQAADSLLSVLLLVFLTTFFWFFGIHGASIVGSLARPLWLQLLEENTTAKAAGEALPRIAAEPFYQWFIWIGGAGATIGLAILLAFRAKSEYGSKLGKAILAPSIFNINEPVIFGVPIVLNPILMIPFIFAPMVLATIAWFATKLGLVSEVVFTAPWTLPGPIGAFMATGGDWRAAVLNIVLILVAILIYYPFFVAYDKNELAKEQGKQIEE

SEQ ID NO: 4164 - protein, 170 aa, Enterococcus faecalis
GGITMEQMRVYIANLGKYNEGELVGAWFTPPVDFDEVKERIGLNDDYEEYAIHDYELPFEIDEYTSIEEINRLCGLAEELEGTPIGEVASEIQHAFFNSFEEMVEHVDDIVYYPDCNDMEDLAYQMVNEGYLGDAPENFVRYFNYSSFARDLEIEGNYLVTNRGIFEYPI

SEQ ID NO: 4165 - protein, 81 aa, Enterococcus faecalis
WKRKESDEMNFGQNLYQWFLTNAQSLVLLAIVVIGLFLGFKREFSKLIGFLVIALIAVGLVFNASGVKDVLLNLFNRIVGA

SEQ ID NO: 4166 - protein, 60 aa, Enterococcus faecalis
KNFGTTKYGNRKFDCMKRGILMGIVKDILLVFGGSMLGVTVMCLMHASTAADRVMEKKGK

SEQ ID NO: 4167 - protein, 402 aa, Enterococcus faecalis
HLEFGGENLAQRNLDYRLLKDRRNEYGVSQNKLAIACGLSRTYLNLIENGGVTASTKTMRKIFDQLESFNPDLPLTLLFDYVRIRFSTTDVRKIIQELLHLKFEYMLHEDYAFYSYQEQYVMGDIVVMLSHEEDKGVLLELKGRGCRQFETFLLAQKRSWYDFFEDCLKTGGVMKRLDLAINDRVGLLDISDLTKKCQKEACISLFRTFKSYRSGELLKADEKDGMGNTLYIGSLKSEVYFCLYEKDYEQYIKLGIPLDQTETKYRFEIRLKNDRAYHAIQDLLKGRSIESTTFSIINRYLRFADKVEGKRRTNWPLNEQWGRFIGRNRKEIQLTSEPKPYTIERTLNWLGRQVAPTWKMAKELDRLNQTTYIQDMVRNARLSDQHKKILEQQSMAIENLIV

SEQ ID NO: 4168 - protein, 85 aa, Enterococcus faecalis
WVIGKIHSDPELKEELRQLNFDIRKNVVKVTGDSYVMDEGTDTRIELNQVIKELERIAYLAKESDIRQYLFEIKAELEVGGITEG

SEQ ID NO: 4169 - protein, 205 aa, Enterococcus faecalis
LPPVKICTSDQNLGNLLNTNPSNRGMSEQVYGSDEFAPTVTGDEGIKIALPLNDGISVMGMLPGNFEQGNRIYEVTGTAPTLSTKQGGTKIMIRKNKIEYQEVKPEGSVNLAFPHSKSRRGRLEKQSVHTLLTGDQQAVITDQYQIRKLTPRECWRLQGFPDWTFDRASQVNSDSQLYKQAGNSVTVPVIFDIAKRLKEVKTDDL

SEQ ID NO: 4170 - protein, 556 aa, Enterococcus faecalis
KNNETGVFAIGGLGEIGKNTYGVQFQDEIIIIDAGIKFPEDDLLGIDYVIPDYSYIVQNLHKVKALVITHGHEDHIGGVPYLIRQANIPIYAGPLALALITNKLDEHGLLREAELHEINEDTVIRFRKTAISFFRTTHSIPDALGVVVKTPSGNIVATGDFKFDFTPVGEPANLHRMAKLGEEGVLCLLSDSTNAEIPTFTKSEKTIGTSILKIFEKIDGRIIFASFASNIFRLQQAADAAVKTGRKIAVFGRSMENAIVNGERLGYIKVPKGTFVDAAELNQLPANETMILCTGSQGEPMAALSRIANGTHRQISIQPGDTVVFSSSPIPGNTTSVNRLINLLSEAGAEVIHGKINNIHTSGHGGQEEQKLMLRLMKPKYFMPVHGEFRMLKIHASLAQDTGVPEENCFIMGNGDVLALTADSARPAGHFNANDVYVDGNGVGDIGNVVLRDRRILSEEGLVLAVATVDIKNKEIMAGPDILSRGFVYMRESGDMIHEGQRLLFNALREAMKDKNCTEAKLGEAMTTALQPFLFEQTERHPMILPMIMTATVSDQ

SEQ ID NO: 4171 - protein, 88 aa, Enterococcus faecalis
IFYWKRAKLRLFMCKCTRRNKRMEQGTVKWFNAEKGFGFISREDGSDVFVHFSAIQGDGFKTLEEGQAVTFDVEDSDRGPQAVNVEKN

SEQ ID NO: 4172 - protein, 202 aa, Enterococcus faecalis
IQEFWEILLRTGSKEADVMTVAATLLKQFKQLSYLQQATLNELMAIKGIGQVKAIELRAAIELGCRIYQSSQIKFGKVTSSQQVAQRLLQEMKGLQQEHLICIYLNTKNDIIQQKTIFKGSLNQSIAHPREIFREAVKYSSARILLAHNHPSGNPTPSPQDIQFTKRMEECGEMMGIQLLDHIILGDSGYISLREENFFASE

SEQ ID NO: 4173 - protein, 277 aa, Enterococcus faecalis
DGAQTNPMIGMLITQIKDASLSGKIQVDAKKEKAFNLEMKLKAMGMDVPISLVGSLDNEGKEPKLYLATDMMEYIVAVADSMTDGAIDSSQLDTEKLKGKYIDLLAMNEESTKEWQDTIKEYQESEKERKQSAKEYKEFLEGLDKDTFEKKGDTITHTFTKKELQKLIKITTETSEKGKEQDPFEKVKDVSAKVSVNTKENKTNMLINVKPQQDKNVDMGLESLSSKISITQKAKKATISMPKKENILSEQEVEKIFSDSTSMTGLSTEDTTVAINQ

SEQ ID NO: 4174 - protein, 253 aa, Enterococcus faecalis
VKNQHLTTSQGSPVGDNQNSLTAGEFGPVLIQDVHLLEKLAHFNRERVPERVVHAKGAGAHGIFKVSQSMAQYTKADFLSEVGKETPLFARFSTVAGELGSSDTLRDPRGFALKFYTDEGNYDLVGNNTPIFFIRDAIKFPDFIHSQKRNPRTHLKSPEAVWDFWSHSPESLHQVTILMSDRGIPLSFRHMHGFGSHTFKWVNAAGEVFFVKYHFKTNQGIKNLESQLAEEIAGKNPDFHIEDLHKYSTTGRD

SEQ ID NO: 4175 - protein, 341 aa, Enterococcus faecalis
  MISC_FEATURE (251)..(251): Amino acid 251 is Xaa wherein Xaa = any amino acid.
ISVPLSFFGGIGGASKLGVLIKGSNYLEILANTETIVFDKTGTLTKGNFVVQNITSVVLPEEELLRLTATAEQLSTHPIAISIKESYGKKTVPATAIEEVAGHGIKATIEGKTVLVGNAKLMKQFGIEAPEVKEAGTLIFVAIDNQFAGYLMIADQLKPDAISAIKELKAEGVKQTVMLTGDNQQVAEAIAKEVGVDKVYAELLPDGKVDRLEELLKASSPKNKVAFVGDGMNDAPVLARADVGIAMGGLXSDAAIEAADVVIMNDEPSRIASAIKLSRKTLRIVKQNIIFAIAVKIIVLALGALGLASMQAAVFADVGVTIIAVLNAMRCLRVEKMKDNN

SEQ ID NO: 4176 - protein, 154 aa, Enterococcus faecalis
FTGGNLNMASNEKTRYKAIIADHTYTIIGQESKQHMDLVTKIVNEQLAEIKHLSPQTDTEQASVLLAINAISDQLKKQEYALKLEKQVADLKQKTIRLAELENRVRRMEIIEEEARDVLKKNGQEDVEIHNHVEAQQILNENRKQQIQNKGVSE

SEQ ID NO: 4177 - protein, 186 aa, Enterococcus faecalis
KDDKMLTILILLLLAFGFYTGAKRGLILQVLYSVGYLISYFVARTYYKEVASHLELYIPYPSVTPTSKLVFFNQEISLDLDKAFYSAVAFLLLLFAGWLVVRFLAIFLHGLTFIPVLKQVNGLLGGVLSVLVLYVGLFLVLATASMIPSDIVQNQFRSSGLARGIVKNTPILTKQAYELWVEPITK

SEQ ID NO: 4178 - protein, 192 aa, Enterococcus faecalis
AKRNFLCYVSVFSTNEKVRKVGGKMNQRILSTLGFDKVKQQLLQFIVTAQGTNEVSELLPIADENKIQSWLNETQDGLKVQRLRGGIPIPKLENIQPHMKRIEIGADLNGIELAQVGRVLSTTSELTRFFDELSENEVDFERLYMWREQLEVLPELNRQLKQAIDDDGYVTDEASPALKAIRQNIRALHNGM

SEQ ID NO: 4179 - protein, 373 aa, Enterococcus faecalis
NKPNVPGVGLKNIKEPVGLRAQPAIPGNVEHSPGGSSGGAAAVVASGIVHIPGASDGGGSIGIPASFSGLIGLKPSRGSMPVGPEGWRGWQGASIDFALTISMRDTKALFYGIRGSHSGAPYQAPLAEWQTHPKKQRLKIALCTASPIGSLISPEATQAAKQAADFLAAAGHEIIEIPYPVDGAALIRSYYQMNGAETTAMMNSIQQGLGRPIRKEEIESFSWTMHQFGQKIPAATYVHSLQLWDQAAVTMEELFQKFDLFLSPTTAFSAPKINEDLQSEHIRQRMAQAAELTEAELAELIYDYFDKSLQLTPYTQLANLTGQPAISLPTHVTATGLPLGIQLLAARGREDLLFQVGEQFEQEGKFKLPESYR

SEQ ID NO: 4180 - protein, 178 aa, Enterococcus faecalis
GGKMLYVVRHGETDYNVARRICGHAEAQLTEKGYQQAELVAEKIAKQGIQIDRLLASPLKRAQETARKIAERNQLTIETEPRLIEMNFGIYDGEPIETTAFQENRSEISLPFPEGESVLDVAGRIYPLIEEALASEETYLFVCHNAVMRVIDNYFNGKKIQDFLDFHCENTQLVQYGE

SEQ ID NO: 4181 - protein, 369 aa, Enterococcus faecalis
LLDQKRNGEKTMRIDNIHQALKQFHVQNPSSKETLLPATASQLSQASGYTRTAVSEELSELVRKDQVVKVKSRPVLFFDKDYLEEQFPFFKSSTCYDSLASLQEDIYQQTEQIHKKKQLLKMNPFANVIGFDGSLADAIKKLKAAILYPPNGLNILLTGESGVGKTLIAEQLHQFYQVKMNQEVPFIYFNCAEYFNNPELLTSHLFGYKKGSFTGAVNDQKGLVELADGGFLFLDEVHRLTSEGQEKLFTVLDKGYFTRMGEAEKQRNVSIKFIFATTEAVNQHFLKTFLRRIPVTLAIPALAERSLKEKIQLILSFFLEESQRIQKNIHIRYEALKQLTFTHFEAHVGELKAANQFMKRQAYFRSVRS

SEQ ID NO: 4182 - protein, 188 aa, Enterococcus faecalis
DLTPWAETPLENGFVSQTGNAQIDQLLSRGGIMSMMPTVALIILTLSLGGLLMELGLISAVMEVVSHKMSSTPKLILSTLLTGIGVNIFIGEQFLSVILPGNAFKEVYKKEGLDPTVLGRTLEDGGTVINYLIPWGIAGSFVSGTFGVPTLTYLPFVFFSLLSPVFSMVSAFTGLGIKRLSAEPVTEK

SEQ ID NO: 4183 - protein, 159 aa, Enterococcus faecalis
LTSQLLTSHLFKEETMSLSLREVSQLLCQLKVLDQKITKVFEEQVGLNLTRYELLMILKERQPCLQTEIQEHLKIDSGAVTRHLKILEEKQYVTRQRNPENNREVLVHLTEKAQQELQQCTAKQQTVTEIIPSTFTKDDCRQLKELLTKLDQSITTKEV

SEQ ID NO: 4184 - protein, 222 aa, Enterococcus faecalis
IKALQRKRYDRMTTYTTNDFSEIVFGRKSVRVYDETHKISHEEMLTMIQEATTAPSSVNMQPWRFVVVESEAGKEKLKPLIRFNTRQNETSSAMLLIFGDLNCHERGEEIYNQAYASGKMPKEVRDQQLAAIIPHYESLSREQMNDIVKIDASLAAMQFMLVARAHGYETNPIGGFEAEKLAETFGLDQERYVPVMILSVGKGMETGYESVRLAPEKITTFE

SEQ ID NO: 4185 - protein, 246 aa, Enterococcus faecalis
SPTRGEDLILASGRPTNGMRPLTDELEMAHYNGHLLSYNGACVTHHGSQQQLFNQTISKSLSQQILEHLKQFDVIPMINDETFMYVNDVFHNTLHLETGDFNIIEYESRGGNFQLCEWRDLAARLNFPLNKILIAGEPAYLQKYHEAIYAPFKETVTAAFSAPFYFEFTAKNIDKARALEKLTLQLRIAAEEVIAFGDGHNDYTMLEWAGTGIAMENAVDELKSIATEVTLSNDNDGIAVALTNFL

SEQ ID NO: 4186 - protein, 125 aa, Enterococcus faecalis
KWLQLEDYAQRQIGELSGGQLQRVFIARVLAQGAEVIFLDEPFVGIDMSSEKVIMDILKSLKNQGKMIIIVHHDLHKVSHYFDELIVLKNRLIAAGPVEQTFTAETLQEAYGDLLGDLLIQGVAK

SEQ ID NO: 4187 - protein, 297 aa, Enterococcus faecalis
FINTGGCKMIAAFIDGLFRYQFLQNALLTSIIVGLISGVIGSFIILRGMSLMGDAISHAVLPGVAVSYMFGFNYIFGASIFGLLAALSIGFITQKSPLKNDTAIGVVFSSFFALGIIFISFAKSSTDLYHILFGNVLAVADTDILITCVVGVIVLIFVALFYKELQLTSFDPTMAQAYGLNIQFFHYALMFLLTLVAVSSLQTVGTILVIAMLITPAATAYLLTNHLPTMIGLASTFGILSSVIGLFFSYSYNLASGATIVLTAALFFLLAFFFSPKKGLVFVNREKEMEESTNEKI

SEQ ID NO: 4188 - protein, 150 aa, Enterococcus faecalis
TVRKKWRNQRMKKFSLFFLTLLAGLTLAACGNQAAEKKEKLAIVTTNSILSDLVKNVGQDKIELHSIVPIGTDPHEYEPLPEDIAKASEADILFFNGLNLETGGNGWFNKLMKTAKKVENKDYFSTSKNVTPQYLTSAGRGTNRRSHMLG

SEQ ID NO: 4189 - protein, 68 aa, Enterococcus faecalis
  MISC_FEATURE (22)..(22): Amino acid 22 is Xaa wherein Xaa = any amino acid.
RLLFYKQKCYATIFNKCRSRNXQKIPHAGLDIENGIKYVEHIRDVLVEKDPKNKDFYTETREKLYRKT

SEQ ID NO: 4190 - protein, 151 aa, Enterococcus faecalis
KKIQKIKISIQKHAKNYTEKLSKLHEEAKVKLGDIPDDKKLLVTSEGAFKYFSKAYDLNAAYIWEINTESQGTPEQMTTIIDTIKKSKAPVLFVETSVDKRSMERVSKEVKRPIYDTLFTDSLAKEGTEGDTYYSMMNWNLTKIHDGLMSK

SEQ ID NO: 4191 - protein, 453 aa, Enterococcus faecalis
FPVVDTCQIGYLDQHVSVEQSLTMVDFLKQAFQELFDKEAKLTKLYEEYSQTASEKLLEQAGKLQTDLDESNFYQIDTIIQDLANGLGLQAIGLDKKLGELSGGQRSKVILAKLLLEAPDVLLLDEPTNYLDDTHIQWLVRYLNNFEGSFLLVSHDYQFLNEVTNCIADIEFGKLTKYTGNVEKSFAQKEQNKQTYLKQYQAQQEKIEKMEAYIRKYKAGNRATMAKSRQKQLDRLERLTPPGSLTKPAIEFPYQGLVATQALTTQKLVVGYREPLLEPLDLMVHVGEKVALKGFNGIGKSTLIKTLTKVIPSLDGEFHYPLNTKIAYFTQDLAWPNEQLTPLDYLSDRFPDTTIKERRSHLARAGLPDKLAMQSLALLSGGEQTKVKLAELMMQTSNLLFLDEPTNHIDEAAKKSLQEAIHVYPGTVFLVSHEADFYEEIVDRVIDIEELVK

SEQ ID NO: 4192 - protein, 136 aa, Enterococcus faecalis
GGERTSAMREKLKVYLVTGRYDFSDTEFLKRIETACRSGVTLVQLREKEVSTRRFYELAVKVKVVTDAYQIPLIINDRVDICLAVDAAGVHIGDDELPVALVRKLVGSTKIVGVSAKTWHEELKRKTRGVFPTMLG

SEQ ID NO: 4193 - protein, 276 aa, Enterococcus faecalis
EGTFMKTSVKFETIFPLTTAPLIQCITNEITCESMANALLYIDAKPIMADDPREFPQMFQQTSALVLNLGHLSQEREQSLLAASDYARQVNKLTVVDLVGYGASDIRNEVGEKLVHNQPTVVKGNLSEMRTFCQLVSHGRGVDGSPLDQSEEAIEELIQALRQQTQKFPQTVFLATGIQDVLVSQEQVIVLQNGVPELDCFTGTGDLVGALVAALLGEGNAPMTAAVAAVSYFNLCGEKAKTKSQGLADFRQNTLNQLSLLMKEKDWFEAVKGRVL

SEQ ID NO: 4194 - protein, 211 aa, Enterococcus faecalis
NFDRLLHPTTFICGWVFLSFSVAPPFASRRKEFFYVEKNRIHRVTLLALMIAMDVVLSPLMRIEGMAPMSSVMNIIAGVLLGPLYGTLMALVCGLIRMTFLGIPPLALTGAVFGAFFAGLFYQWGQKLGWSMLGEIFGTGIIGSLLSYPVMVWFTGSKQNFYWFIYTPRFIGATLIGSVIAWLVLVKLKETRVFKQTQELFLGGYFYENKR

SEQ ID NO: 4195 - protein, 325 aa, Enterococcus faecalis
LRFSMSAMMQGEAFLSFIGQFYQENEHFVPKEVLIPDDIDKESVEALLATKVLQPQRGEKKKLVKLASKNAAVALNEKFDLIVRKQERTIGAVEKLGNAMNIPAPIRIEAFDNSNIMGTNPVSAMVVFIDGRPAKNEYRKYKIKTVQGPDDYASMREVIYRRYSRVLKEGLPFPDLILIDGGKGQVDVAKDVLANQLGVDIPVAGLAKNDKHKTSELLFGPNLEVVPLERNSQEFFLLQRIQDEVHRFAITFHRQLRSKNSFASKLDNIEGLGPKRKKNLLKEFKSLKNITAASVEELRKAGLPETVAKNVYRHLHQETTSEIEK

SEQ ID NO: 4196 - protein, 68 aa, Enterococcus faecalis
KRGRLIMKILTPVYQIKFKKVPNQLLIDERLMNELGRWLNRTGRIWACQSSKSAKEFKTTFYESTSCP

SEQ ID NO: 4197 - protein, 285 aa, Enterococcus faecalis
  MISC_FEATURE (283)..(283): Amino acid 283 is Xaa wherein Xaa = any amino acid.
VHPRGQALLFFADEAGSPGTDMTFFDFPGLPKGTKGTNTISRTSFRVKDDATLDYWVSRFNEYAIDHGEIQERFGKKYLEFEDFDNQRYQLISDEKNQCVAAGTPWKKSNVPSEHALIGLGPAFVTVENYEHLQLVLTEVLGFKLIDAEGSFHLFEVGEGGNGASIIVEHREDLPAAQEGYGNVHHLALRVADEEALRFWIEKINRLEFPNSGFVERFYFKSEYFLAATHVLFELATDGPGFLEDETYEHAGEKLSLPPFLEPKRAGIEKFVRPFDTSDANVXRN

SEQ ID NO: 4198 - protein, 209 aa, Enterococcus faecalis
EAPMIHYNSNKLSAKTAYKFLSGSIIPRPIAWVTTQDTATGVVNAAPFSFFNAAAAEIPLATLSILRPDEEPKDTARNILATKELVIHFVNEERLTQMNQTSASLAAEISEIDTFGIETIASQTVAVPAIKAAPIRMEARLHQYVPIANHEGQIITDLFIVEITDFYFDSAVFDEEHQYILPEKLQPIARLAGNDYTTLGEIREVRRPT

SEQ ID NO: 4199 - protein, 254 aa, Enterococcus faecalis
SPTPGWTPLWIAAYPIDGVSPYPLYAYFPSMDGIGIWQFTSAYIAGGLDGNVNLTGITDSGYTDTNKPETDTPATDAGEEIEKIPNSDVKVGDTVKVKFNVDAWATGEAIPQWVKGNSYKVQEVTGSRVLLEGILSWISKGDIELLPDATVVPDKQPEATHVVQYGETLSSIAYQYGTDYQTLAALNGLANPNLIYPGQVLKVNGSATSNVYTVKYGDNLSSIAAKLGTTYQALAALNGLANPNLIYPGQTLNY

SEQ ID NO: 4200 - protein, 64 aa, Enterococcus faecalis
IREPMEIIERAPAKINLGLDVLHKRVDGYHEVESIFASVDLADHLTFENLEEDIIRIETDSSFL

SEQ ID NO: 4201 - protein, 119 aa, Enterococcus faecalis
KFDKTAGLSSKSSCKQTSSMINLKFFKKSDIMFLEVNAMPTTLSSIKKDLEGRIGSEIMLVAQTGRKRQTERKGILTETYPSVFVVDLDPDENSFERVSYSYSDVLTRTVEIEFIGQAV

SEQ ID NO: 4202 - protein, 200 aa, Enterococcus faecalis
IIRYVYRKGGLFMLEQIQQALAGDQEQFQALYGQYQPVIYKCMKKYYLKDYDTEDWLQEGRIVFFRTLERFDSEKQASLGKFFKRNFENHVHSLIRHQCAYKRRTDTLSISLEQRLESAGEELVDYLGTAATDPLGQLMIQEKLAAFPTRLSSLEQQILNAYLKGYTLEEIAKVRGGTFSAVRSAYDRAKAKMKYTLENE

SEQ ID NO: 4203 - protein, 179 aa, Enterococcus faecalis
GDCMKKQLLIVDGYNMIGAWPELVQLKKQERLEDARELLLSRLSNYAKYEGLEIIVVFDAQLVPGIQQTYKKYLLTVVFTKEDETADSYIERLAGEKNDRLTQVTVATSDLAEQWVVFSQGALRTSANELYKAVQKTEKTIAIHATDIHFQQFRRNSPWNVEQLSKLSEKLEELSQKKD

SEQ ID NO: 4204 - protein, 432 aa, Enterococcus faecalis
LKVMNKIVLGAKLELSRRYFWEYCKLTASDFYKQDREYLKELCDDLQEFIYDSDNDVLVINEPPRHGKSRTAGKFVEWLLGNDTRKKIMTGSYNETLSTTFSKSVRNTIQEIKADKNRVVFSDVFPGVEIKSGDGAMNLWSLTGGYNNYLATSPTGTATGFGADIIIIDDLIKNAEEANNAMVLEKHWEWFVNTMLSRLETGGKIIIIMTRWNSNDLAGKALKELPQSGYKVKHISMKAYNEETDTMLCESVLSKEEYFRKKKTMGADIASANYQQEPIDLKGRLYQKFSTYETRSNYIKIWNYTDTADTGADNLCSIVFGETEDHKAEVLDVLFTKEPMEKTETAHAEQIKNNQVNHVRIESNSGGRGFSRNSERIVKERGYRGAYYEPFHQSANKQSRILSNSALVENNVYFPSDWKIRWPEFYEAMTTY

SEQ ID NO: 4205 - protein, 160 aa, Enterococcus faecalis
NYTGGEVMAKYTEWISEEGLIKIGGWAKDGLTDEQIAQNIGISRSTLNEWKKRFPDIKDTIKRGKEVVDRQVENALFKSAVGYEYTEITKELTDSGMKVTKRVTKQVAPNPTSAIFWLKNKKPDEWRDKKETQVSGEMSVNNPFAGLSEKELRKLAESDE

SEQ ID NO: 4206 - protein, 74 aa, Enterococcus faecalis
IHNVDFNNKFMNGDVDMSRAFEDEQDKQARMEAATKYYNGEHKCDNCGHLFYPNENDPEQFVCDKCIEHAMNRD

SEQ ID NO: 4207 - protein, 276 aa, Enterococcus faecalis
NYRGAKMLEALFWDHNGDFQSATAAAAVALIGAIISAVFSWLSYKNSVKTAERQYIMEQKKIDANLKAKARIEWIIGVRDKTSELVSLLLSLQKEKTVFYEQWLEIEKVSELLKLYFNSKMNKKVNSEIYIEQNKIIISETATSIVLKENNNINKHAYIKKYIECLVELYKDDNYKNISNKIRFYHDSINKLYEDNFEYWMSHEQSELEKIKNTPPEKLEGEDYDYVAAEKNIEHYQRKIKDIEVSLTNYHKAIDFFTTVISLYLKIEWDKAKEGQ

SEQ ID NO: 4208 - protein, 68 aa, Enterococcus faecalis
KVIGRFRYNMNIPHPKHSIVSMRVVMSVQIKENASIFEMTREATPKEIDDCKLVYCGHVFFDEADIPK

SEQ ID NO: 4209 - protein, 73 aa, Enterococcus faecalis
GDEKMKKVVSILLMVVAGFTLTACNGSKLDKTGEEFKKAIIAENSDLDNKDYKESDFSFLTYKDKYKKPNRRY

SEQ ID NO: 4210 - protein, 179 aa, Enterococcus faecalis
KMKKLSLVVLLLGAGLVFTACGGNTKGHETVVSSATASVDMKPVDDMTSTKGSEVTEKSSTKPMQIKDKLAEEKVSDTYQLVEDFGNAYANFSSINDRNEKLKKLMTAECVKKNGIDVKTGAKLESKGEVSAIYQNDKKEYAVLLDCEQNGTKTRVLLLAKVQGNKVVEMTYNSVKQEY

SEQ ID NO: 4211 - protein, 82 aa, Enterococcus faecalis
FKLRRKLKMFLNKRSGLTNRQIKEVCSRFNCKKNEFAVQKYQDGFLVAVNNKEYRVKFSEGIFSKIVYVKEVQRISKKVGRK

SEQ ID NO: 4212 - protein, 98 aa, Enterococcus faecalis
MVSCKSEVVSLNIINSYFLGMREINFPVYQKQFKQIDLELFISLADFMGNLTELEKNNYIQLVLEDLKKFLMSIESKNYSRTVQRMLLDMKTEIAKII

SEQ ID NO: 4213 - protein, 355 aa, Enterococcus faecalis
NDYQPSFLLKGEIMKKLGKVLIVSCFIFILPFLLFLGVFSSSESGDSSQFQPATPQEKVALEVSNYVTSHGGTLQFASAWIGNMEHESGLNPARIQSDLAFNPSIAYNASLGGYGIGLGQWDSGRRVNLLNFAKSQKKEWKSVALQMDFAWNKDGSDSDLLKRMSKSKDVNTLAVDILKLWERAGTKDDPVEQVKRKTSANNWYKRLSTGSMGGGSANIGGGKIDVLEKVMGQTINGGQCYGLSAFFVEKQGGFQMMGTGHMFASEIGNDYNWPSIGWKVIKNPNYSDIKAGDVINFGQGGVATSIYGHTGVVAGVKGKGKFTTYEQNAEQGQIVAKYSRTWGLDFPHVTSLVRK

SEQ ID NO: 4214 - protein, 231 aa, Enterococcus faecalis
ALNLAKDHFIDDNGQFAGVKTGLNSLLNRSTQEEQQPFKDDMLPEEEIAEVEEPTNVDNEELEEIEDKALTDEVDNFEDSTDDEMDNSLEEFDVPVLDENVSDFDTDTSLADENNIELEPIIENELDSLDSSVESSENDREEPIQELDEQEIADNLNVRVDNFDELAFAREERAFFDGGEDSELITNNNDSLNNVYSFYQTEENFNNLEQTEEQFFGSVNTEEYNFDVVEG

SEQ ID NO: 4215 - protein, 68 aa, Enterococcus faecalis
DNCPILTFLSEGQVQQPSFESKMNEKTKETVERTGEIGVGAVKARIGASTGNLALAADGASHLMPKHD

SEQ ID NO: 4216 - protein, 73 aa, Enterococcus faecalis
QWSYVIQGDSSPIKKDGRTYQFQLKNEECSVLKIIVTKDPSKFIVVIMEARKVYFIVEYDQRKSFPIMGRHLF

SEQ ID NO: 4217 - protein, 158 aa, Enterococcus faecalis
SMISVCIATYNGEKYLAEQLDSILLQVSEEDELIISDDGYTDHTLEILRTYAANYPQIQLLQGPGQGVIANFAFALTHTKGEVIFLADQDDVWLPNKVTTVTEYFETHPDIQVVISDLKIVDADLQVTNPSYFKFRKVKPRVLAKCDKKWLYWGRYGL

SEQ ID NO: 4218 - protein, 120 aa, Enterococcus faecalis
KLLMRIYKLPIPLILSFEKSNQGFWRNAIKSGYIGAGMAFSQEMKDVILPIPPEVPMHDMWIGLLAARKKQTGLIKEPLVLYRRHGANVSPIITKTSFQQKLNWRVNLLKALHQRLKEQR

SEQ ID NO: 4219 - protein, 274 aa, Enterococcus faecalis
KYLRRLFMKGIILAGGSGTRLYPLTKATSKQLMPIYDKPMIYYPMSTLMLAGINEILIISTPEDTPRFESLFGDGHDLGIHIEYAVQESPDGLAQAFIIGEEFIGDDSVCLVLGDNIYYGGGLSKMLQRAASKESGATVFGYHVNDPERFGVVEFDEEMRALSIEEKPAQPKSNYAVTGLYFYDNEVVEIAKGIKPSERGELEITDVNKVYLEKNKLSVEVMGRGFAWLDTGTHESLLEASTFIETIEKRQNLKVACLEEIAYRMGYITKEQLV

SEQ ID NO: 4220 - protein, 183 aa, Enterococcus faecalis
ERRNVKVIDTKLQDVKIIEMDVFGDHRGFFTESYSKAKFAEHGLDFDFVQDNHSLSTEAGVLRGLHFQKGEAAQTKLIRVVTGAVLDVIVDIRKGSPTYGQWEGYILSEHNHRQLLVPKGFAHGFVTLTPNVNFMYKCDNYYNAAADGGIAFNDPALAIDWPIAPEKSDYVRKGSKTSNLKRI

SEQ ID NO: 4221 - protein, 176 aa, Enterococcus faecalis
EKSRRVSIMKKIIVTGGAGFIGSNFVHYVVKNHPEVHVTVLDKLTYAGNEKNLEGLPSDRVELVVGDIADAELVNRLVAETDAVVHYAAESHNDNSLNDPFPFVQTNLIGTYTLIEACRKNNVRYHHVSTDEVYGDLPLREDLPGHGKRRKGKNALPKRLTILQVLILQQKQDLTC

SEQ ID NO: 4222 - protein, 95 aa, Enterococcus faecalis
  MISC_FEATURE (52)..(89): Amino acids 52 & 89 are Xaa wherein Xaa = any amino acid.
SLWRFTFKRRFTRTWKKAKGEKCTAETPYNPSSPYSSTKAGSDLLVKAWVRXFNLQATISNGSNNYGPYQHIEEIIPRQITNVLSGMTXKLYGAG

SEQ ID NO: 4223 - protein, 126 aa, Enterococcus faecalis
RRQVLNGQAFVGERKPGRIVTILGDTRKTKNSVTLARRADVLVHESTFNKHEAKMAKAYFHSTSQQAAEVAKEAQVKQLILTHISARYLTKEAYQLQEEAQEIFPNTKIVKDMDIIEIPFANEGGA

SEQ ID NO: 4224 - protein, 262 aa, Enterococcus faecalis
MDLTNKVVVVTGGSAGLGEQICYEAAKQGAVVVVCARRINLIGKVREQCAVLSGRKAFSYQLDIADPESVERVVEAISAEVGPIDVLVNNAGFGLFENFVEIDLAVARQMFDVNVLGMMTFTQKVAIKMIEAGQGHIINVASMAGKMATAKSTVYSATKFAVLGFSNALRLELKPLGVAVTTVNPGPIQTEFFDKADPTGTYLAAVDKIVLDPTKLAKEVVGSMGTSRREINRPFVMEAAARFYTLFPHLGDFIAGNILNKK

SEQ ID NO: 4225 - protein, 164 aa, Enterococcus faecalis
IKNKGVDQVMKNQWRVILGLVLVLIVVIFAVLNNQAVPVNFGFTKISGPLILIILGSAIIGALVGLLTSTTTIWNQRKELKAVQKELDIYKNDMDKLVKEETEKVQRSFDNQLADLQAKQAAAPQVSEPVVNEQTSNTEVDVTPVSGSRIDRYVKPRVNEEEQK

SEQ ID NO: 4226 - protein, 396 aa, Enterococcus faecalis
FLEKFCYNYLVRSDVVKKSNYQWQLQTKTELPVEFIEQLKKEEINPLIGQLLWHRNIRTEEALRKFLHPTIEDIYDPFLMHDMEKAVARIQQAVEAGEQILVYGDYDADGITSTTVMKEAIELVGGMVQYFLPNRFVHGYGPNKDVFAEQIEQGVQLIVTVDNGVAGHEAINYAMAQGVDVIVTDHHELPEQLPEAYAIVHPRHPQGDYPFGDLAGVGVAFKVATALLGELPIELLDLVAIGTIADLVSLTDENRTFVKMGLQMIQTGDRIGLDVLLQEAGVKKEAVSEESIGFTIGPRLNALGRLGEAAPGVELMTTFDEEQALEIAKYIDQQNNERKDIVTTIAKEALDLIDPNAPVHILAKQGWHEGVLGIVAGRIMQETGKPTIIFNNELYQ

SEQ ID NO: 4227 - protein, 64 aa, Enterococcus faecalis
LRIHEKPASGPRLEHPFRIIKRQFGFVKARYKGLLKNDNQLAMLFTLANLFRADQMIRQWERSH

SEQ ID NO: 4228 - protein, 66 aa, Enterococcus faecalis
NRRTNYMSMFLDQVTIDVKAGKGGDGMVAFRREKYVPDGGPAGGDGGRGGDVVLGKVRISGEILLG

SEQ ID NO: 4229 - protein, 357 aa, Enterococcus faecalis
RKSLFQQGSKETQTFKGGIFVMTVKVGINGFGRIGRLAFRRIKEVSDDIEVVAINDLTSPTMLAHLLQFDSTHGTYPGTVTATENGIVVDGEETRVYAEPDASKIPWVKENGVDIVLECTGFYTSEEKAQAHLDAGVKRVVISAPAGAMKTIVYNVNDDTLDANDKIISAGSCTTNCLAPMAYFLNNEFGIEVGTMTTVHAYTSTQMLLDGPVRGGNLRAARSAADNTIPHSTGAAKAIGLVIPELNGKLQGHAQRVPVVDGSLTELVSILKTKVTADQVNEAMKKHTIDNPSFGYDDREIVSGDIIGTTEGSIFDPTQTEVTTAGDFQLVKTVAWYDNEYGFTCQMIRLLEKFANL

SEQ ID NO: 4230 - protein, 183 aa, Enterococcus faecalis
EYLANYSYFFYNYFNLIDKLSFLICNHSKQGAVIMDSTAALKKTKKQLHESGFKLTPQREATVLVLLENEKDHLSAEEIYFLVKQKSPEIGLATVYRTLEILTDLKVVDKVSFNDGLARYDLRKEGAKHFHHHLLCLECGTIEEVEEDLLGEVEQIVESRYHFLVKDHRLTFHGICQSCQSKH

SEQ ID NO: 4231 - protein, 293 aa, Enterococcus faecalis
MRELLATTFTGIVVDENEQFYFVQKNGITFRLKKEEGTHAIGEAVEGFGYLNQKQEPALTTTIPTVRIGSYGFGTVTGTRRDLGVFVDVGLPDKDVVISLDELPTMRELWPKKEDRVMVTLKVDSKDRIWGELADEKVFKAMAKRGNAEMQNQNLTGYVYSLQPAGTYILTDDLYIGFIHPSERFQEPRLGETVVGRVIGVRPDGVLNLSLKPRSHEVISDDALMILTFLERANDHQIPFTDKSSPDEIKQTFGISKAQFKRALGHLMKQKLIKQEDGKTILIGSLEQSKEKN

SEQ ID NO: 4232 - protein, 217 aa, Enterococcus faecalis
RRCKTVEVSYKDGKTTNQLNRDTYQAAKAEVDKVTSDKLKKELVKQVTTADQALTKVEEEQKRIAEEQAAAEQAKQAEEQAKQAAAAKKEDAKKEETAKTEANGYTAPNSDGVYTSPLYAPDAADIADSSNPAWTWAPGVKEKVLDTVIARGYVVPGGYSLEPAKIVNGEGYYNLYATNNQSKLLEGTTEKNVHMYLVTINAKTGWFKGNASRNAGQ

SEQ ID NO: 4233 - protein, 290 aa, Enterococcus faecalis
QFIIVKTIQVVVMEDLSWGQTEDLNASENITFIEGSVTDQQLMEKVLQEYQFDNIFHLAAIASVADSVARPVETHQVNFESVLQLLELIRKYQKDLKRLVFASSAAVYGDEPTLPKQEESVIRPLTPYAVDKFASEKYVLNYCHLYDVPTSAVRFFNVYGPNQNPNSPYSGVISIVMDSYKRLLANQEVTFNIFGDGKQSRDFVFVEDVVQALNLVAHSDQSLGEVYNVGTGKATDLNELICSLNDIMKVTLPVEYKEARAGDIKDSLADISKLRAIGYEPKYSIQSGSG

SEQ ID NO: 4234 - protein, 483 aa, Enterococcus faecalis [sequence omitted]

SEQ ID NO: 4235 - protein, 95 aa, Enterococcus faecalis
ITIGNRIPINFKLSLYSGNHIPKTNLTGTYNSRIAYVNGTKTPLNVTNKDGNRSLFVRLNNGNITIPTALIKVKNIFDKLKVKDNLPKVSIVQRC

SEQ ID NO: 4236 - protein, 108 aa, Enterococcus faecalis
WRKHGQSSFKQEIDLTDKQNHFEERLNTLRRRLQRTEAAENYLDNQPHVEEFEYKDKVLSNLIKELNMRVSLLERKKIIPILCAFFKYHHKFYFSTDIYHIMKYKIRK

SEQ ID NO: 4237 - protein, 572 aa, Enterococcus faecalis
PCGEDSTEEQATFAESKGQLALSGRSSRAITRTKNIMQEAHLAGSKQKRKIVEGQLSLDDLDQKIDDGVDIIDWKAVIVVSGSTKKQMRARKKYLINRFDSLDIPLIKATFDNPYLFQSTLFGNFLRMQTSRWQHTSTIESFAELNFFTSLHAGTKLGFYLGRVDTTLEEKEDRKSIISSSKNLIFMNMLLANKEGVDGKKTNNPHWALTGDTGNGKSVTAKTLFMQMALLKDRVLYIDPKKEMRKQFMYTINDPEYQKKYPLDVDFVKSFNFVTLDVRDTKNHGVLDPIVLFDETEAIATTKAMLTNIYEGTWNLKQKTEINEAIAKVVLERKEGKKVGFWHVIERLVESEISDVKDMGRFILSTVKGSVLELAFSHGDVEGLSFDKKVTILEIEDLDLPTDKNENLDENKRLSVTLMFALGTFCSKFGSRNPKEETVTFFDESWIFQSSPEGKAILKSMKRIGRSFNNFLVLITQSTNDLDDSEDGTGFGTVICFDEVQNREGVLKYLNLPVNEINMKWVSNMVQGQCLMKDMFGQTNRIVVHVIFEEWLELFKTVDDTEASKMENRFVA

SEQ ID NO: 4238 - protein, 393 aa, Enterococcus faecalis
EGSENMQYLIDSYSAYTVDGGLLDKGWQVVNWFFVDIPFFILRMFVSFFLFCENVLNQSSFFEGKQETVLNMSKNVLSGIGGKGFRGGSLLALAILISAYYLLYHFFSSRRSFSKVFLHYLAVVILFGFWFGSVSTSTGTTSGSMFLIQSTNAIAKGVQSTFTTSANLGTEGSKDGEVYQSPIFDATVKQTFNFVNSGSLDGKMENGKKLDEGKLLEKPKLSKKEKAKFEDERSTYIKNNEKDNPYFSQDGAKTMEKAFGVGVGLVNLAVLAVPVTYINIMLNVIQIIVDLLILVFPIIALVSFFPRCQMMMFKFFKSLIGILFLPVVFGIFLSVLFWINKLIDQAFLGLMDKVSSSLLMVMSGGVFSFMGTFNCYLHLGENYFVSENLEKQI

SEQ ID NO: 4239 - protein, 90 aa, Enterococcus faecalis
LFDLYFKLSIKEKLGKKHSNENPVNTDTGVVIVAVEDSKPIIQLADGTTKKVEAKEIGADVQKDGTVTVKGSDGRMKVLPNTGESQNTAF

SEQ ID NO: 4240 - protein, 247 aa, Enterococcus faecalis
CKIEKKDREDRVMNHFKGKQFKKDVIIVAVGYYLRYNLSYREVQELLYDRGINVCHTTIYRWVQEYSKVLYDLWKKKNRQSFYSWKMDETYIKIKGRWHYLYRAIDADGLTLDIWLRKKRDTQAIVTDKAPSLGSAFRKLQSVGLYTKTEHRTVKYLNNLIEQDHRPIKRRNKFYQSLRTASSTIKGMETIRGIYKKNRRNGTLFGFSVSTEIKVNGNTSLRYLEFREGAFDFQTLQQNPSLYRQTL

SEQ ID NO: 4241 - protein, 72 aa, Enterococcus faecalis
NLFRRLIGRWSCSIKLLRYFTVRCSVLVYKPTLCNFLKAEPREGALSVTIACVSRFFRNQISKVKPSASIAR

SEQ ID NO: 4242 - protein, 66 aa, Enterococcus faecalis
IEMKKVCAILMISASVLGMVPSNVPIFTAEINYAHENELQMNPFVIAFVDKVKGSVAKFENQTRPL

SEQ ID NO: 4243 - protein, 328 aa, Enterococcus faecalis
EELIMCTAITYVSKDHYFGRNFDYEISYNEVVTITPRNYKFSFREVGNLDHHFAIIGIAAGIADYPLYYDAINEKGLGMAGLNFSGYADYKKIEEGKENVSPFEFIPWVLGQCSTVDEAKKLLKNLNLVNINFSDELPLSPLHWLLADKEQSIVVESTKEGLRVFDNPVGVLTNNPTFDYQLFNLNNYRVLSTRTPKNNFSDQIELDIYSRGMGGIGLPGDLSSVSRFVKATFTKLNSVSRSSEYESISQFFHILSSVEQQKGLCDVGDEKYEYTIYSSCCNLEKGIYYYRTYDNSQITAVDMNKENLEKDSLIVYPMVETQQINYAN

SEQ ID NO: 4244 - protein, 142 aa, Enterococcus faecalis
DVIIVAVGYYLRYNLSYREVQEILYDRGINVSHTTIYRWVQEYGKLLYQIWKKKNKQSFYSWKMDETYIKIKGKWHYLYRAIDADGLTLDIWLRKKRDTQAAYVFLKGLVKQFDEPKVVVTDKAPSITGPLRNDFLTGIWPN

SEQ ID NO: 4245 - protein, 81 aa, Enterococcus faecalis
PWATIFVITLAIVKFKKSYMIVALTFLIRRFIVGCKNMANYSIKFGKRKINNPFIHGKWMKRTSKLKENGIICIEPSMQMV

SEQ ID NO: 4246 - protein, 213 aa, Enterococcus faecalis
RRIDMGKFQVIDHPLIQHKLTMIREKNCGTKVFREVVNEIAMLMAYEVSRDMPLEDVVIETPMGKSTQKTLSGKKVAIIPILRAGIGMVDGILELIPAAKVGHVGLYRDEETLQPHEYFVKLPEDIASRQLFVVDPMLATGGSAIMAIDSLKERGASNIKFVCLVAVPEGVKALQEAHPDVDIYTAALDERLNEDGYIVPGLGDAGDRLFGTK

SEQ ID NO: 4247 - protein, 79 aa, Enterococcus faecalis
QLRGKPLSHSSFRESLLVCVELADDQLLEIFPYLFSFIILFFLIVKQKSRGHKLNSLNPKLRLLFVQRIALQLSLMLII

SEQ ID NO: 4248 - protein, 104 aa, Enterococcus faecalis
QFLLYTVVIRQWRWIIMKTLLNKQAMETLMKSKNDDVYSLAKRMNVAPSTIYRILNGDRGVGSDLIAKLLRAFDLSEKDFDKLFIFSEVLPNVNGGSKSCQKKT

SEQ ID NO: 4249 - protein, 103 aa, Enterococcus faecalis
LMNFGEKLKYLRESKGLGVNQLALKSGVNASNISRLEKGIRKDPTFDTVKKLARALGVSVSYFDDEEKEINTVAAHIDDDVTEDEMNEILSFIDYIKKRDHNN

SEQ ID NO: 4250 - protein, 159 aa, Enterococcus faecalis
KVGVFMVTSEELMARFSDLTYKFEPSMPEKQKGLYINNVVYLNPQQHPRELISTVAEEIGHHLTSVGDIIDQDTNEKRKQEQKARDIGATMVVTPQELIDCYHERFTYVWECADFLGITKQALECALATYSKQFPEGLIYGDYKLFFKPNGTLGIVEWF

SEQ ID NO: 4251 - protein, 198 aa, Enterococcus faecalis
RSLFMQKSVLSLLGISLLLLTACGGSKLTVENLDSLKKGMSENEVSEILGYPDKVEENIVKDWIYNTDKKYENVVISFYDNKVSSIDVPYSISPKGKNPITPEKYLNSSSEPEDAQTKTSSDKNSNINDLTTDPSIDQKIILRALAQQQFDSQYPYKGSKIHSVLGILKDWTKQDDHWFFSAESTILNIYGAKASKTV

SEQ ID NO: 4252 - protein, 100 aa, Enterococcus faecalis
ITKGLNIMMTPYELREKLKRDVPEVTIYPILTNPYYSEEEYQDVLKDQLKLKKDIETDNMVTLPLFSWEEKELKMDQFYEKGWYKPKLYTLPKSMFRSED

SEQ ID NO: 4253 - protein, 410 aa, Enterococcus faecalis
RLMASIKSYKLKNGQERWEYFVSNGRNNGTGRQQKIHKRGFRSHKEALKAAKIIEGQIASEEFVKENPQKMTISKFMNIWINEYKNNVKEGSRIVYRDAIRMYIDPYIGNYQLNKYKPADHQKFINSLFTNKELGKNKNGLSYNTVKIVNAALSNAFKKAQKLGYVKSNPTYLVEFPLDKVKEKTNKEKKLEFYTLEQENLFLDTARNFDDFMWYVFFLIIFDLGLRKGEVMALRWFNFDFRDNILTFDKQRLYRKEQPGQVILDDVKTDAGKRSLKMTNRVRNSVLELYSINYDLTSNVLPMTNSNQDFLFINHRGKNVGLPIRQRSVDTAWHRIIQKANLPKIRIHDGRHTNAARLRQAGVPLEDIKDMLGHKNVKTTEIYAHVSPEVKERAVNKLELYQMQHKKSGN

SEQ ID NO: 4254 - protein, 158 aa, Enterococcus faecalis
IRRKRWQSIFPAAADFSTDLHSMGQYVQEGMRNLFETVVKIENPRHSISIPEQNEDLDGLGYLQGKEIDFVNTKAFEGTLLAHTDGGVPNMIVKVPTMDAYSLGYVMYFFEIAVGISGYLNGVNPFDQPGVEAYKRNMFALLGKPGFEELAKDLNARL

SEQ ID NO: 4255 - protein, 110 aa, Enterococcus faecalis
  MISC_FEATURE (18)..(18): Amino acid 18 is Xaa wherein Xaa = any amino acid.
GIRRNEGLKRKTKPFHYXALRNILYRKGKTTEMLFNYEPGMHYFSEWLKQLYGESEGKDGKVFSQQPQTFQLTYIPWVNMFKKVCVTYLKQWLKLKIHAIAFQFQNKMKT

SEQ ID NO: 4256 - protein, 970 aa, Enterococcus faecalis
RRCEKRFVETLAIQTEDVIFPEQPQLFVAMGAALYSEDAAECTLEELIQRLVNSQATDLQPSDTLPPLFNSAEDLADFRERHAQAQATEKPLSQHTGVTFLGIDAGSTTTKVTLIDEDGHLLFSFYGNNQGQPLETTMTVLKSLYQQLPEEVFIGKAAVTGYGEQLIKNALKVDIGEVETMAHYKAANHFQPGVDFILDIGGQDMKAMTIKNGVLSSIQLNEACSSGCGSFIETFAQSLKYNVKDFALAALESQAPVDLGSRCTVFMNSKVKQVQKEGASVGDISAGLSYSVIKNAIYKVIKVRRPEELGEKIVCQGGTFYNEAVLRAFEKISGREVVRPSIAGLMGAYGAALIALDAYEIGEETTLLSLEELAAFTSEKEFTHCGLCENNCQLTVTVFSDGRQFITGNRCERGARIKIKREERKVNLVDYKYRKLFKYRPLRENKAFRGRLGIPRVLNMYENYPLWHTFFTDLGFRVELSPRSNKQIYEQGLETIPSDTVCYPAKMAHGHIQALIDAQVPIIFYPGVVFEQQETVEADNHFNCPIVQSYPDVIRNNVDAIREGQVDYRNPYLNLANEAAVAKVLAENFADLGISLEEIQTALHHGYQELAAFKKEIQEKGEETLAMLTEKGQRGIVLSGRPYHLDPEINHGIAEVITQEGFHVLTEDSISHLGDVQNLRVVNQWVYHSRLYAAAKVVAKTKNLELVQLNSFGCGLDAVTTDQVEEIMDRSGKIYTVLKIDEGANLGAIRIRLRSLKAAVNEREKQQFVPHMQMEEPEKIVFTKQMKKTHTLLLPMLSPIHQSGLVDVALQASGYHVVCLPAQDKEAVNVGLKYVNNDACYPAIISIGQLVEALESGQYDLDNVSVLMTQTGGGCRATNYIPLLRKALNDAGFSQVPVVSVSMGNKGVESNPGFKFTLPMIKRLVVAFLYGDLFERVVYRTRPYETEKGMVDQLHQDWLKRVEAYVRVLP

SEQ ID NO: 4257 - protein, 962 aa, Enterococcus faecalis
NKFTAPLMLYAKDPNIQWPIYRATGANLTDISITVLGTGLLLEDNQRLVQVQEAVPSVLKSVSSGDGLYPDGSLIQHGYFPYNGSYGNELLKGFGRIQTILQGSDWEMNDPNISNLFNVVDKGYLQLMVNGKMPSMVSGRSISRAPETNPFTTEFESGKETIANLTLIAKFAPENLRNDIYTSIQTWLQQSGSYYHFFKKPRDFEALIDLKNVVNSASPAQATPMQSLNVYGSMDRVLQKNNEYAVGISMYSQRVGNYEFGNTENKKGWHTADGMLYLYNQDFAQFDEGYWATIDPYRLPGTTVDTRELANGAYTGKRSPQSWVGGSNNGQVASIGMFLDKSNEGMNLVAKKSWFLLDGQIINLGSGITGTTDASIETILDNRMIHPQEVKLNQGSDKDNSWISLSAANPLNNIGYVFPNSMNTLDVQIEERSGRYGDINEYFVNDKTYTNTFAKISKNYGKTVENGTYEYLTVVGKTNEEIAALSKNKGYTVLENTANLQAIEAGNYVMMNTWNNDQEIAGLYAYDPMSVISEKIDNGVYRLTLANPLQNNASVSIEFDKGILEVVAADPEISVDQNIITLNSAGLNGSSRSIIVKTTPEVTKEALEKLIQEQKEHQEKDYTASSWKVYSEALKQAQTVADQTTATQAEVDQTETELRSAVKQLVKVPTKEVDKTNLLKIIKENEKHQEKDYTASSWKVYSEALKQAQTVADQTTATQAEVDQAEAKLRSAVKQLVKVPTKEVDKTNLLKIIKENEKHQEKDYTASSWKVYSEALKQAQTVADQTTATQAEVDQAETELRSAVKQLVKVPTKEVDKTNLLKIIKENEKHQEKDYTASSWKVYSEALKQAQTVADQTTATQAEVDQAEAKLRSAVKRLTLKNSGENKKEQKNGGNNGHLNTSTGVDQTGTKQVKPSSQGGFRKASQFLPSTGEKKSIALVIIGLLVIASGCLLVFRKSKSKK

SEQ ID NO: 4258 - protein, 60 aa, Enterococcus faecalis
IPRFFPTNSFIIAEFLNLRKKLVKKELGFPYKSWGSLLVFLVIKAQGYARKTMISIIDKN

SEQ ID NO: 4259 - protein, 578 aa, Enterococcus faecalis
SERNEGFIMSFDGVFTHSMVHELTETLVSGRISKIHQPYENEVVLVIRAKGKNHKLLLSAHPSYARIQLSTITYSNPETPPNFVMMLRKFLDGAILETIQQIENDRVIHFTFSKRDELGDLQNIVLIVELMGRHSTIVLVNQSSGKILDAIKHIGMSQNSYRSLLPGATYIEPPKPMGLNPLTASKEEVFALLSTAPELNGRYLQQHFQGLGKDTADELSARLLAQPNEKMAIWTEFWSSVTEAVVPTLTVTEKKEYFTPIPYQSLVGEQTTYATLSELLDAFYSGKAEKDRVKQQGGELIRKIENELKRNQKKLKKLQQTLADTENAENYRRDGELLTTFMAQVPKGATDVELPNYYEENAPLRISLNPALSPNQNAQKYFQKYQKLKNAVRVVKTQIQQTQQEISYLESVVAQLEIATPMDIEVIREELIEQGYLKRKKNKKQKQPKKSQPDLFYATDGTPILVGKNNLQNDQLTLRTAKKTDYWLHAKDIPGSHVIIRDAHPSEETLTEAALLAAYFSKYRLSSQVPVDYVQVKHVHKPNGAKPGYVIYENQRTLYVTPTEESIKKIQQNKASAS

SEQ ID NO: 4260 - protein, 161 aa, Enterococcus faecalis
SQGAMSLVKELSINNGKLYQYPVDAIKTLRTSCEDFTSKIETSNTYELEVTFPANQKSELLLFADDKGNGLSLIVDTKEGKVILDRSKAGIQYAIDFGMTRECLIDTEETIANIFVDNSIIEIFINKGEKVFTSRVFPEKDQNGIQIKSGKPIGKYFELEY

SEQ ID NO: 4261 - protein, 335 aa, Enterococcus faecalis
NQGNLLENTLNWNINMVAKLTDVAELAGVSPTTVSRVINNKGYLSEKTKKNVHEAMKILGYKPNNLARGLQGKSPQLIGLIFPNISNIFYAELIEYLEIELFNQGYKTIICNSENDPGKEREYLEMLEANQVDGIISSSHNLGIADYERVQAPIIAFDRNLAPNVPIIASDNFEGGKLAASVLRKNGCQNIIMITGNDNTDSPTGLRALGFSFQIPEGKVFKVPNSLSTIRREMEIKSIISTNKPDGIFISDDLTAILTMKIVKKLNLNIPEDVKIIGYDGTSFIEQFFSQLTTIKQPIDELAKLIVDVLLKKIKGEKINKDYILPVSLLSGGSI

SEQ ID NO: 4262 - protein, 121 aa, Enterococcus faecalis
KMVKVPHQGDILLLNTAPRSGHEQTGKRPYIVLSHDIIADYSNVVIVAPISSTKRNYPLYVSINPSYGMKTSGKVLLDQLTTIDYEARQCVFLETAHEKLIDELLLKVRTVFQKVNKTNKF

SEQ ID NO: 4263 - protein, 91 aa, Enterococcus faecalis
EVNKMVMLSIKKWGNSNGLRLPKSVMEYLQIHTEDKVKITQEESNGKKRLIIEAVDSDNDLTIEQLFENYKEEKVHVTIQDLGNAVGNEKW

SEQ ID NO: 4264 - protein, 294 aa, Enterococcus faecalis
VRRVKQMEETNTFDMRGYVGIASLLVILIAGIGLFIYGASHTNGVLVVLGIILLVGAILFLSSLTIVSPNQAKAILFFGRYLGTIKENGLFITIPFTQKMNISLKVRNFNSSLLKVNDSDGNPIEISAVIVFRVVDTAKALFNVDYYQDFVEIQSETAIRHVATQYPYDTFSDNDVTLRGNTEQISEELTKELQERLAVAGVEVIETRLNHLAYATEIASSMLQRQQAKAILAARQTIVEGAVSMTQMALEQIEEGQEINFTDERKVQLINNLLVSIITDKGTQPVINTGDVSS

SEQ ID NO: 4265 - protein, 291 aa, Enterococcus faecalis
MRYLSKDILEEVITQRPSDSYKSNFGRVVLIGGNRQYGGAIIMSTEACINSGAGLTTVITDVKNHGPLHARCPEAMVVGFEETVLLTNVVEQADVILIGPGLGLDATAQQILKMVLAQHQKQQWLIIDGSAITLFSQGNFSLTYPEKVVFTPHQMEWQRLSHLPIEQQTLANNQRQQAKLGSTIVLKSHRTTIFHAGEPFQNTGGNPGMATGGTGDTLAGIIAGFLAQFKPTIETIAGAVYLHSLIGDDLAKTDYVVLPTKISQALPTYMKKYAQPHTAPDSELLEQKRSR

SEQ ID NO: 4266 - protein, 181 aa, Enterococcus faecalis
WFITNEKAQSYWKKAQAELGEKVNVELMVTDDGSYKKIGESLQGSLQELFPGLTIELTALPTEAALNFGRESDYDLFLIYWTPDYQDPISTLMTLYKGNDRNYQNPVYDKLLDEAATTYALEPEKRWATLIAAEKEVIETTAGMIPLSQNEQTVLQNDKVKGLNFHTFGAPLTLKNVYKEK

SEQ ID NO: 4267 - protein, 71 aa, Enterococcus faecalis
IKNGKGKQRRLANDNLRKALALGIDKENLVNNIIADGSKALHGAITEGFVANPTTGLDFRQEAGNLMVYNK

SEQ ID NO: 4268 - protein, 62 aa, Enterococcus faecalis
TSTALNLFEDGQLDVATLSGELAQLNKNNTLYHSYPTATMNYLRLNQKRKGQATPACKRQPA

SEQ ID NO: 4269 - protein, 83 aa, Enterococcus faecalis
RSKRPKPYFTSLLAFPTFFPQNQKVVEQFGADYGTASDKVVYNGPFVVKDWQQTKMDWQLAKNNRYWDHQNVRSDIINYTVIK

SEQ ID NO: 4270 - protein, 218 aa, Enterococcus faecalis
EHKKMKSYRRKKMKKYLKITMVCILLVGFLAGCTNKNENKKKQKNTKEAVQLMSPSELTTLNTSVLLDFPDAIVQTAAFEGLYSLDEQDQLVPAVAKALPMISEDGKTYTISLRKEAVWSNDDPVTAHDFEYAWKKMIDPKNGFVYSFLIVETIQNGAKISAGKLAPNELCVTAVDDYTLKVTLKETKTVLYVLVSFSDIFPAKSKSSRTIWCGLWNC

SEQ ID NO: 4271 - protein, 266 aa, Enterococcus faecalis
  MISC_FEATURE (34)..(34): Amino acid 34 is Xaa wherein Xaa = any amino acid.
LTMNSKINSANLMIYFGIHCSVLMYYSALVCAPXTIIPTFTIVIDYTVAMAVTYCYLILSFVEVGFLFYYLFSMRKKQDQFVLQAGDYRYGDDDQYWRYGIYINPKDPNIMFPDRIGMNLFINLGRPPGKIILAATGILTIAVLFFATVPMFINDFSSHASQATIENKQIELSSPLAKTRSIPFNQIIAVSLIDDLPQERIRTMGAATDSYLTGEFKVAGKPAYLLIYTKSHPILKIETRKKVYYYTARDGQETTKIYQEIKAKLP

SEQ ID NO: 4272 - protein, 70 aa, Enterococcus faecalis
SEMEKTVKIDGMKCDGCVQAVTEKFSGIDGVTNVAVHLADQTAVVTADREVSQDELNTTLADTKFKVVSE

SEQ ID NO: 4273 - protein, 250 aa, Enterococcus faecalis
QSTNESYFWVNIKVMKEDAIELSTFVQQADRLAEEGKTPMFPAKDGSFAGIIAVADTVKDSSQTAIARLHKMGIEAVMITGDNKRTAEAIAKQVGIDRVLSEVLPEDKALEVKKLQAEGKKVAMVGDGINDAPALAQADVGIAIGSGTDVAMESADIVLMRSDLMDVPTAVELSKATIKNIKENLFWAFAYNTLGIPVAMGVLHLFGGPLLSPMIAAAAMSFSSVSVLLNALRLKGFKPSTVKRTSGSQK

SEQ ID NO: 4274 - protein, 91 aa, Enterococcus faecalis
REAIVGADKERQLPLAEGSDCSAIPGHGIRVTVNERVLLLGQYKSNERRRNRVINVCSTSGSLGRRRENPNVSGKRWFVCGYHCGSRYCEG

SEQ ID NO: 4275 - protein, 364 aa, Enterococcus faecalis
AYHCPDFLNPMTHAMTFAMVQLILTLPVLYVGREFFTVGFKALFKGHPNMFSLVALGTSAAFVYSLYGTVMIFLGDTSFTMALYYESAGVILTLITLGKYFEAVSKGKTSDAIKKLMGLAPKTAHILRDGVEIEVPVDAVQLDDIVIVRPGDKIPVDGVIVSGSSSVDEAMLTGESLPVEKKVGDAVIGASINKNGSFQFKATKVGKETALAQIIQLVEDAQGSKAPIAQLADKISGVFVPIVIGLAVLSGLAWFFLGQESWIFALTITISVLVIACPCALGLATPTAIMVGTGKGAENGVLIKSGDALETTHKIQTIVFDKTGTITEGKPVVTDILVADSALSEAELLTLAASAEQGSEHPLA

SEQ ID NO: 4276 - protein, 229 aa, Enterococcus faecalis
KGVKKMESKTFDIEGMSCASCAQTIEKATAKLPGMAKASVNLATEKLSVTYDQTEVTEEEIKEAVSDAGYKAISPAQQRTFAIEGMSCASCAQTIEKAVNQLSGVQQAIVNLATEKLVVSYDDHQVTSAEIIKAVTDAGYQATEEVAAGATADQDREKKQKHIAEMWQRFWISAVFTVPLLYIALGTMVGLPLPGFFESNDTCDDLCNGSIDFDFTRSICRQRIFHSWF

SEQ ID NO: 4277 - protein, 160 aa, Enterococcus faecalis
LELFFIDERRNLTSMAKDKLATITDAEWEVMRVIWTQGKTTSREVHTLLNEKKEWKSTTVKTLLSRLTDKGLVGTEKAGNKYIYYPLVEERQSVETVADELLAKVCSRKVGSVVETILTESQLSYDDLDRLEELLKEKRKTAVESVPCNCIPGQCQCHLI

SEQ ID NO: 4278 - protein, 286 aa, Enterococcus faecalis
LVQLLVYSWKEAFFVGLVLAATSVSISVEVLRELNVLSSKEGATILGASVVDDIVVVIILSVAVGMIGASTGGNTEVSFIVKLIEQGLFFIGIFFLVRFIAPYLLRLSQKMNIGSSVIIMSLIICLGMAYLADLVGLSSVVGAFFAGIAVGQTDAKTEIDFNIEAIGYAVFIPVFFASIGLSVTFNTLGKDLPFILVMTIMAILTKLLGGAWGAKMVGFSNTSSLMVGAGMVSRGEMALIIAQIGYQSKLLSEAYYTSMIVVIILTTLVAPFLLKYFVKKQESALQ

SEQ ID NO: 4279 - protein, 411 aa, Enterococcus faecalis
RRKKRWGNMGEFFSQRLSRHFKKMSKYLRYILNDHFVLVCMFLLGGLGLYYSQLLKELPRDFVWGRPLILLGWLLLIQVGKLATLTEEPDKVFLLPKEKQFAAYLKRALRYSLLLPIVVSFLGSGLLMPLIVVTTGWSFQTFFLFLVMLVCMIYTHLSLQSYGLYHRSSTTYRSWWFVWLISSLLIMTGAIYWTPWVGVIGGIILAVCLSSIWQNKMKQSFLDWEKMIQKEQNRMHRIYKFIQLFTDIPEVSSTVKRRKYLDPLLGVVKNTSENTYAYLFIRSFLRGSEYSGLLFRLILVGGVLLFFLQEFWIALVVALLFVYLIGFQLIPMYTQFDYMVMTQLYPISIEKKQAAIRRLISGALSVAAIIFGGIVCLRLGSLQNSLIILGALIVEVVIFTKMYVPMRLNKL

SEQ ID NO: 4280 - protein, 316 aa, Enterococcus faecalis
KIPLFSRFFPLLYHKLISLWMKKYVSSLKSSFHFVYNKRKKKIHLIKGVIFEFLVRLGFNNGREKRLEAKEMSLTIEHLTGGYGHIPVLKDINFDVKSGEMVGLIGLNGAGKSTTIKNIIGLLTPQKGKIMIDGETLQQAPEEYRKKIGYIPETPSLYEELTLKEHIEVTALAYDIPLEEAFKRAEPLLKTFRLDNKLEWFPANFSKGMKQKVMVLCAFLIEPSLYIIDEPFLGLDPLAIHALLELMDTMRKQGAAILMSTHILATAEKYCDRFVVLHEGKLRANGTMAELRAEFNLPESSLDDIYLALTKEEKVG

SEQ ID NO: 4281 - protein, 147 aa, Enterococcus faecalis
RKEEFFMNDCIFCKIINGEIPSYKVYEDEKVYAFLDITQVTKGHTLMIPKQHVADIFEYNDVLASDVFARIPKVARALEKAFPEMEGLNILNNNKEVAYQSVFHSHVHLIPRYSKEDDFSIHFGNHQEDYSAEAMQEIAETIAKQVN

SEQ ID NO: 4282 - protein, 70 aa, Enterococcus faecalis
MKKFIKGLFFGAAAGTIGGLLAAPRSGKETRQHLINELEDYRSLKNQVTNDWDQVQRNLAVVERKRSTGN

SEQ ID NO: 4283 - protein, 70 aa, Enterococcus faecalis
KIKSRMTGIRCNEIWQLSKENVPLATEFSKDLQQEITDFKFQAEPRIAQIKEQIAKITAELPDTQTNKQK

SEQ ID NO: 4284 - protein, 368 aa, Enterococcus faecalis
DSFFFKMRYGIVITEIKLKKTGVHKRMKKKLILAAAGAMAVFSLAACSSGSKDIATMKGSTITVDDFYNQIKEQSTSQQAFSQMVIYKVFEEKYGDKVTDKDIQKNFDEAKEQVEAQGGKFSDALKQAGLTEKTFKKQLKQRAAYDAGLKAHLKITDEDLKTAWASFHPEVEAQIIQVASEDDAKAVKKEITDGGDFTKIAKEKSTDTATKKDGGKIKFDSQATTVPAEVKEAAFKLKDGEVSEPIAATNMQTYQTTYYVVKMTKNKAKGNDMKPYEKEIKKIAEETKLADQTFVSKVISDELKAANVKIKDDAFKNALAGYMQTESSSASSEKKESKSSDSKTSDTKTSDSEKATDSSSKTTESSSK

SEQ ID NO: 4285 - protein, 72 aa, Enterococcus faecalis
ITAVSMFQKINKKREWSIDHSLFYAYLEEDSVVLLEESVAFSESLVLVSLVLESLDFDSFFSEEALEDSVCM

SEQ ID NO: 4286 - protein, 76 aa, Enterococcus faecalis
EDVVVLRHMVLAHHGLLEYGSPVRPRIMEAEILHQIDTMDASIQMMLGAIRQTQPGEYTERIFGLDNRSFYVPKDK

SEQ ID NO: 4287 - protein, 91 aa, Enterococcus faecalis
HYLERNRESSFTDFELMIELRNEILRLKLQDDLSMTKFRKLVQSPKLPSVDTIMKRTNKNWEDLMTEIGFDYRKIKINKQRNNLSKKKKTK

SEQ ID NO: 4288 - protein, 910 aa, Enterococcus faecalis
  MISC_FEATURE (900)..(900): Amino acid 900 is Xaa wherein Xaa = any amino acid.
TSFLLPKNERGFYFMIKPIFKKWRLFAALALLGQTIVGAIDPMIVFADEIAHPQTVTVELDLAHQYVVEGTFSDGRPMSEVTVPHYAVYNGVKQDVFCIEPGVPIDNEFTPGYEKNPLPDMPEKAKLVSVLWKKAGTDVDTHIVAQKMIWQEVNGYTLHSIKRLNGSAVNIAAIEAKINQAIADYQKKPSFHNSTAKIVLGQSTTMTDTNNLNLSEFDEVVENTANIDYRVNGNQLIITPHASSKESGVLTLKKSAGTGTPVAYKKVGQQTLMAGAIDKPNTYTVKIDVETEGSLKIKKVDKESGAIVPGTVFHLDFGKTLPAKDVTTDKEGIATLDGIPHGTKVTITEKSVPAPYTIDTIPMTATIKAGETIFMTSKNTREKGQIILDKTGIETGSDLWNDNYSLAGNTFAIRKDSPTGEIVQEMTTDEKGHAETPKEIANALELGTYYVTETKASNGFVNTFKAVKVELKYANQTVALVTSNIKGQNQEITGETTLIKEDKDTGDKTQGRAVFEGTEYTLFTAKDGKAVKWSEAFKPELVKGTKASDETVTLALDEKNQAAVKHLAINEYYWQETKAPEGYTLDETKYPVSIKKVDDNEKNAVITRDVTAKEQIIRFGFDFFKFAGSAAGTAETGFNDLTFKVSPLEGTNEITGAEDEAITAYNEQLGFDGYGKFENLPYGDYLLEEVEAPEGFQKITPLEIRSTFKENKEDFVKSEYVFTITEQGQKQPIKTVTVPYEKLTNKAFSVSLNRLMLYDLPEEEDSLTSLATWKDGNKKLNTLDFTELVDKLRYNLHEIKEDWYVVAQAIDVEATKAAQEKDEKAKPVVIAETTTTLANKEKTGTWKIRHKLTTEQVLDKTIVLFNYVYENKEAFEAGDEPVSKDAILNNQAQTVNCTVXRHVSIQTKAH

SEQ ID NO: 4289 - protein, 115 aa, Enterococcus faecalis
NFGKLRKNEKRGPCMFISFNMFILLIVATILMIFLIIYLTVTGNDKNNKKKQKKETKRTTPTLNKKTTVPPSQKPNVVTDVAKKSEPEKQAVQRTQQSTTREDETSQFTRSQRHK

SEQ ID NO: 4290 - protein, 208 aa, Enterococcus faecalis
KTTTLFCVKVSIFSTCVVDLLFPNVGQAMVEVLERYGCETVLPTSQTCCGQPTYNSGYVTESTTTLKNQIDSFDGADYVVGPAGSCVGMMKEYHKFLADDPIYGPKAQRLAERTYEFSQFLYRVLGVKDVGATLHGKATYHRSCHMTRILNERESPFVLLDHVKGLEMIPLGHLENCCGFGGTFSVKMPAISEQMVTEKMNDVIDTGA

SEQ ID NO: 4291 - protein, 494 aa, Enterococcus faecalis
GGTTVGLSTSNKPLSERIEESKKDVFMQKAVAKAQDAQWEKREGAREALGNWPQWRELGEQIRQHTIQYLPDYLEEFSDNVAKRGGKVFFAQTAEEANEYVKQVVLEKKAKKIVKSKSMVTTEVDIDPMLLGLDDVSVMETDLAEFILQMDDWDEPSHIVFPSIHKNREQIRQVFAKKLGYQGDNDPVNLARCAREVMRKFFLEAEIGITGCNFAIADSGLINLNTNEGNADLTISIPKTQIVLMGMERIVPTMREAEVLDNLLARSAVGQNLTTYVTFAGQKNADESDGPEEFHVVILDNGRSKALGTAFQPVLQCIRCGSCLNVCPVYRHIGGHGYGSIYPGPIGAVLSPILGGYKQFGELPYASSLCGACTETCPVKIPLHELLIEHRKVMTDDLKMKHGFEDFQMRMVGKATGSPAMFKAAMKVDHAAAGILSKPKDITVENMYNHGGYLDKGPGLVKGWTDVRDLPRPPKSSENFRSWFKKHQEGEKND

SEQ ID NO: 4292 - protein, 145 aa, Enterococcus faecalis
KVGPMFVICQDHQNLQKTSEVGSKNIKKVKKMTNEAIQNREPFLQNLREKLDVEKQPVSAHPFEPVNHLPEEQLADKTPAELLTIVKERVETIHTNLVETTQENLLTTIQQIVAEFGGDNLLLPTDARFEAYGLADLAQSLELLL

SEQ ID NO: 4293 - protein, 222 aa, Enterococcus faecalis
GVTILEKRQEVQELTLEEVMGDRFGRYSKYIIQERALPDIRDGLKPVQRRILFSMNKDGNTFDKGFRKSAKSVGNIMGNYHPHGDISIYEAMVRLSQDWKLREVLIEMHGNNGSMDGDPPAAMRYTEARLSQLSGELLKDIDKNTVDFVWNFDDTEKEPTVLPAKYPNLLVNGSTGISAGYATEIPTHNLAEIIDGTVYLIDHPNASLEKLMDTLPVFTTSC

SEQ ID NO: 4294 - protein, 143 aa, Enterococcus faecalis
  MISC_FEATURE (30)..(30): Amino acid 30 is Xaa wherein Xaa = any amino acid.
SLLKELEKNQSIEYAWTDGELAEVIDKVGXGYMLQRYKGLGERNAEQLWETTMDPETRTLIRVRIDDAAQAERRVTTLMGDKVELRRKWIEQHVQFTLEEDGSILDRSEEDTSAPTGESLLDAEKTKEAEQTDDTEISLFDIE

SEQ ID NO: 4295 - protein, 144 aa, Enterococcus faecalis
QINKRVSNLIEMIGLTGFEKAYPRELSGGMKQRVGFARALAIEPSLLLLDEPFSALDIITASQLSNDLLEIWLNNQIATKSIVMITHDVQQAVQLSDRVVLMDANPGRIAKIYSIDIPRNQRSPKTTIDIVEQITEEMVRRIHL

SEQ ID NO: 4296 - protein, 91 aa, Enterococcus faecalis
ERSESMTTMLAIIGTVAIITVQVIEYNMTEIHIPTAGTFNDDDAEPPHSSVTLVFIRTILITLSLNFPSHFFEMVFLCIRENNKQKRLLNQ

SEQ ID NO: 4297 - protein, 101 aa, Enterococcus faecalis
VQRVCQFRHAGKIFWKAVTGFEPVMKVLQTSALPLGYTAIFHFCYKKTGVAGFEPTHDGVKVRCLTAWLYPNKITKGDRWESNPRMPEPQSGVLTTSPRSP

SEQ ID NO: 4298 - protein, 82 aa, Enterococcus faecalis
TLYQGFESLTLRFIFTNWPVGQAVKTPPFHGGNTGSSPVRVIYFNSNIPFWRFSSAGRAPALQAGGQRFDPVNLHYSVGSVV

SEQ ID NO: 4299 - protein, 198 aa, Enterococcus faecalis
ANPAVKVTLISVVLALIVGVIFGLFSVSPIKALRVLSTIYVDLIRGIPLMVLAFFIYFGLPGVLGFNIPVFIAGIITLTLNASAYISEIVRGGIKAVPVGQMEASKSLGLSYNRTMQKIILPQAIRIMIPSFINQFVISLKDTTILSAIGLIELLQTGKIIVARTLQSTMVYFVIALIYLILITSLTKLAKNLEKKVN

SEQ ID NO: 4300 - protein, 247 aa, Enterococcus faecalis
TNMTEKILVEHLVKKYGDNTVLNDINVSINEGDVVCVIGPSGSGKSTFLRCLNQLEEASSGDIIIDGANLTDKNTDINQVRQHIGMVFQHFNLFPHLSILENIVLAPTDLGRLSKDEAEKKALELLERVGLADKKDAYPDSLSGGQKQRVAIARALAMNPDIMLFDEPTSALDPEMVGDVLGVMKDLAKQGMTMVIVTHEMGFAKEVANRVMFIDGGNFLEDGSPEQVFENPQNPRTKDFLDKVLNI

SEQ ID NO: 4301 - protein, 134 aa, Enterococcus faecalis
RKEISGLTTAVMMWNVTIIGLVIGMGFLTIAFINLVATLLVLALAHFKRKTPLKRLQLIVKMKEPMIKESRLHEQLQASLEKGERLVELTLESEQEAVTAKISYVGKEDFWHSNLHHLLKEKGHVQSVSVTETI

SEQ ID NO: 4302 - protein, 119 aa, Enterococcus faecalis
YKISQIVTCKKGEKAMNSLEMIELSLTDVVIRMALAVVFGALIGLERSIKRKRFGISTNAILCLASCTISILQIQSVDILVHVVKQNSAMASIISMDITRYGAQVISGVGFLGCGDYRF

SEQ ID NO: 4303 - protein, 125 aa, Enterococcus faecalis
  MISC_FEATURE (42)..(42): Amino acid 42 is Xaa wherein Xaa = any amino acid.
KTAIVGPLKREVRMTGMVGDGINDAPALVNADIGVAMGDGTXIAIDVADVVVMKNDLSKLGYAHRVSKRLNKIVQQNIIFSMLVVATLIVLNFLGIANIAFSVLIHEGSTLVVIFNGLRLLVNTK

SEQ ID NO: 4304 - protein, 114 aa, Enterococcus faecalis
ALATYLMKAMTPDNFSVIMQEIISFFMLFEFIMMILRYIQEGHHIPIRYLILICLTAILRQLMVAHGDGLQTLLLSLSILLLVVVLFILGLNGSKFYTLGKAKVEEDHEQDFHH

SEQ ID NO: 4305 - protein, 335 aa, Enterococcus faecalis
LFDSCHHWFDLLSFFSFFIIANLLQKSMNHQKTSSRKFTENFTFPYFLLNTFVVNYFSDFKEEIMNVYLFLALFFIIIGILSYSFFIEPKCLVIHKNQIKVTESGKTLRIVQLSDIHLKKNYSVKALKQIVEKTNTLQPDIVVFTGDLFDDYARFGIEIQDEVSQLFRKINAPYGKFAIYGNHEYSGLDTNFYETILEAADFTVLKNTGKLLPVSHRISLYVAGLEDSLYGQTDLAAALVNRPTGTPTLLLTHEPDVADSAVNKNIDLILAGHSHGGQIRLPFFTYKNQLAKKYTHGLYHLEDETPLIVHPGIGTTKISARFGVLPTIELIELTI

SEQ ID NO: 4306 - protein, 362 aa, Enterococcus faecalis
EKRKKVEPMMARVEKLRELMKENNLQGFLVTSPYNLRYLTNFTGTTGLAMITLDKAFFVTDFRYTEQAAEQATGFTIVKNTGHIFDEVADLAERLQLDNLAFEETQVSFADYSLLEEILPCELVPVMGLIEELREVKDEEEVSIIEKACAIADQGFAFVLEMIKPGMTEIEVANQLDFFMRSKGASGVSFETIVASGLRSAMPHGVASHKVIEKGELITLDFGCYYEGYVSDMTRTFAIGSIQPKLKEIYDIVLEAQLKVLAEAKPGLTGIQLDAIARDHIASYGYGDAFGHSTGHGIGLEIHEGPNVSFRADKQFVPGNVITDEPGIYLPGIGGVRIEDDLLITAEGNRVLTHAPKELIIL

SEQ ID NO: 4307 - protein, 114 aa, Enterococcus faecalis
SFYKGWENMDIQEYQRFISAFYKKRNWYQYDPFIRSNFLTEEVGEVCRAIRTIEIGRDRSDETVLADEENLENLTEELGDVLDNLFILADKYDISLEMIMQKHRTKLMERYPEE

SEQ ID NO: 4308 - protein, 562 aa, Enterococcus faecalis
SQFRGEEPLSKMPIAVQNDKKAIDGGTLDVAVVMDTQFQGLFQQEFYQDNYDAQYMLPTVQPLFNNDADFKIVDGGPADLKLDEDANTATIKLRDNLKWSDGKDVTADDVIFSYEVIGHKDYTGIRYDDNFTNIVGMEDYHDGKSPTISGIEKVNDKEVKITYKEVHPGMQQLSGGVWGSVLPKHAFEGIAVKDMESSDAVRKNPVTIGPYYMSNIVTGESVEYLPNEHYYGGKPKLDKLVFKSVPSASIVEAMKAKQYDIALSMPTDTYPTYKDTEGYQILGRPEQAYTYIGFKMGTFDKETNTVKYNPKAKMADKSLRQAMGYAIDNDAVGQKFYNGLRTGATTLIPPVFKSLHDSEAKGYTLDLDKAKKLLDDAGYKDVDGDGIREDKEGKPLEIKFASMSGGETAQPLADYYVQQWKEIGLNVTYTTGRLIDFQAFYDKLKNDDPEVDIYQGAWGTGSDPSPTGLYGPNSAFNYTRFESEENTKLLDAIDSKASFDEEKRKKAFYDWQEYAIDEAFVIPTLYRNEVLPVNDRVVDFTWAVDTKDNPWATVGVTADSRK

SEQ ID NO: 4309 - protein, 73 aa, Enterococcus faecalis
MDMPLYMENYLLALQSKYSQEITVKWVWAVVILLSVIGCIGYAVYCSWVGGTFAGSIKIGVPDLVHVTFNCKR

SEQ ID NO: 4310 - protein, 261 aa, Enterococcus faecalis
TLIFKEEGASILWRLLVKKLMIRIENLTKKFDRKVLDNITISLPKNRVSVIVGINGSGKTTLLDCIVGLKDATSGKVFIESYSNDSEKFKECIFYIPSEFYLPNYMTGKEYLNFVLSRYRCSDIERIDDFLELFDLKFAGTNLIESYSFGMKKKIQIVAAALANTDYILGDEIFNGLDFETTLLTLELFENLSREVGIVIISHNKLIIERFSENILLMSNGNLTPFLGASENLEKEVISTEKIHEKIKYIKGYHPINRVIY

SEQ ID NO: 4311 - protein, 171 aa, Enterococcus faecalis
VRRKFMKKLNTSKDIILLIELFIDNALRGLLKHSILSKKSTRIVIGVCVFFIYFAYFFFNMSELARIVPDSEKISHILIEQGRKITFYSYFSNTFVLGIIAYILVDNTVALDKNSLFFVKTLPFRKKDISLSFMLFKFVIMILLYELVMIISTPAIKLVTTVRLHPREMAY

SEQ ID NO: 4312 - protein, 295 aa, Enterococcus faecalis
EDNAMTVQIGNEFLIATFAEEGAELVSLQSKETGIEYIWQGNPEFWARHAPVLFPIVGRLKEDTYMYQNQAYHLTQHGFARDQVFDVIEKGGEEVSFSLKSTKETKKKYPFDFELVITYTLEHQELTVNYQVEYTGKEEMYFGIGGHPAFNVPLESSLTFEDYYLSFSPKKSRTQIPLAGPFIDLANKTLAQTNTSFDLTHQLFENDAMIFETKGQTAITIATDESDHQVTLSYPEMPFVGIWSPTPKEAPFVCIEPWCGIADAVDATGQLAEKFGINKLPANELFKTQYMISVK

SEQ ID NO: 4313 - protein, 275 aa, Enterococcus faecalis
RFKSLHLIKKAGGEKMATLLEKTRQVNELLQKNNLFDVQAELPYNKMAMILGDILESNAYIISSSGDLLGYTEKLDVNNARIKNMFKEKKFPQGYTEAVDMLKVTEANIPIDSDLTAFPFESRELYPFGLTTIVPLYGAGKRLGTIILARVEKSFNEDDLVLAEYSATVVGMQILYHQSRTIEAEVRSATAVQMAINTLSYSELKAVHAIFEALDGEEGRLTASSIADEIGITRSVIVNALRKLESAGIIESRSLGMKGTYLKVLNQQFIKELEK

SEQ ID NO: 4314 - protein, 60 aa, Enterococcus faecalis
HRDTDNIGARRLHTILERLLEDLLYEAPDMQMGEITITEAYVNEKLNDIVQNEDLSRYIL

SEQ ID NO: 4315 - protein, 252 aa, Enterococcus faecalis
TCLTWVNNPAEAQEEITEDIRTNRRTILEQLEKGLLDNREVTIEIEEPKKTMPAMNNGLEQMGIDLNETLGALSPKKKIERTVTVKEAQELLVKEESAKIVNDADIHSEAIRLAESSGIIFIDEIDKITSKSQQNSGEVSREGVQRDILPIVEGSQVNTKYGPLQTDHILFIASGAFHLSKPSDLIPELQGRFPIRVELDDLTADDFVSILTEPNNALIKQYVALIGTENVSVIFTKEAIERLAHIAYDVTP

SEQ ID NO: 4316 - protein, 199 aa, Enterococcus faecalis
ARGKSMNELNKTPKEIVKELDQYIVGQQAAKKSVAVALRNRYRRLQLEENMQQDITPKNLLMIGPTGVGKTEIARRLAKIVNAPFVKVEATKFTEVGYVGRDVESMVRDLVENAIQIVEKQQYSRVYAQALKKANQRLVKVLVPGIKKEQKQAGGNQFEQMMNMFNMGQQPGRSTRRNNGRYSNESPNNFGTAGKRSIR

SEQ ID NO: 4317 - protein, 208 aa, Enterococcus faecalis
QKKVYKKIIERFILVHNGGKRLGGTIMVESQFHSTTICAVEKDGKFAMAGDGQVTMGESVVMKGTAKKVRRIYNDEVVVGFAGSVADAFTLEEKFEGKLNEYNGNLTRAAVELAQEWRTQQSMQKLEAMLIVMNKEEMLLVSGTGEVITPDDGILAIGSGGNFALSAARAMKNFGDKEMPAKEIAKNALNIAADICVFTNHNIIVEEL

SEQ ID NO: 4318 - protein, 303 aa, Enterococcus faecalis
  MISC_FEATURE (2)..(2): Amino acid 2 is Xaa wherein Xaa = any amino acid.
RXLSHGRKDWPELFARYLIVERGYSQKTKKAYQEDIQHFFSFLKTSGNDNYLTVEHLDVRAYLSELYDQEYSRNSISRKIASLRSFYQFLLKNEAIQENPFSYVHMKKKQLRLPRFFYEKEMDALFESAQGEQPLDLRNQALLEVLYGTGIRVSECANLTVDAVDFQASVLLVHGKGNKDRYVPFGSFAQDALKDYLENGRALLMTKYQKKHPYVFVNHHGEQITPTGIEYVLNQLIKKSSLNAEIHPHMLRHTFATHLLNNGADMRTVQELLGHANLSTTQIYAHVTKESLQKNYRTFHPRA

SEQ ID NO: 4319 - protein, 128 aa, Enterococcus faecalis
FKRQGEIKMKKKILAGALVALFFMPTAMFAAKGDQGVDWAIYQGEQGRFGYAHDKFAIAQIGGYNASGIYEQYTYKTQVASAIAQGKRAHTYIWYDTWGNMDIAKTTMDYFLPRIQTPKNSLFHHGFD

SEQ ID NO: 4320 - protein, 106 aa, Enterococcus faecalis
RRYQRNKGKSEMVLADNCGHRGVSSCLFIYKIFRRCIRMILPDKYYKIIKWGVLTVLPASSVLVATLGKAYGWQQTDMTVLTINAIATFLGVVTGVSAYNLKDKEK

SEQ ID NO: 4321 - protein, 95 aa, Enterococcus faecalis
AVFIYREKELYVKDELIQDVVERLVRIETKLDNYEVLREKTEDAKEKADYAFSIAKNNEEDIKEIKENQKWSWRTIAGIGVSVVVYLFTKYLGGV

SEQ ID NO: 4322 - protein, 271 aa, Enterococcus faecalis
KLNFRRKRMYTFKKGDADYQVMLNENFKEITDSFEDGLFVRKNSKILDLNDAILPGIYSIPATGVDNKPLPNSGSLFVCKDPGGVRQLFQTERTIFIRQLGGVPSSWTDWKKVAFEKEQPFEAWYSPGTNHAGFKNKARYNLGPEFSNIGQRLGLPMKSEPLEWNSGRWQAKVLRDCKLNISGTVKYHVGSSRGVLYAYTHIDKGLDEGVGDLGIGSAVGAVGGLDYRNVAAFDLNVTLKKGEYLAFRLELAADKQLDYTQLSSMHITELV

SEQ ID NO: 4323 - protein, 150 aa, Enterococcus faecalis
GVNMTELNREMIETLVRQIVTEKLMPTKQVDPSGIMSIKLPEIDVTEDDRLDTGNPADIVYTKDLFSLEESPRLGCGLMVMKDTTFDWTLEYDEIDYIISGQLDILIDGRKISATAGEIILIPKSSKIQFSVTGDARFVYVTYPADWQSQ

SEQ ID NO: 4324 - protein, 251 aa, Enterococcus faecalis
AMMGPTLVFTIPVALGIIQKDDQQFLATGVLSGIITIPFGLLAGGLTAGMPLSLIIPNLIPIIIVAALIILGLWLAPKGMIKGFQIFGQGVVIVAIFGLVVGAIQLLLGITVIPGIAPVTEGIEVVGGIALTLAGAFCLVAVITKVFNKPLMKLGKVLGMNEVAAAGMVATLANNIPMFQMLKDMDNRGKIINIAFAVSASFVLGDHLGFTAGVAKEMIFPMIVGKLVGGITAIFVAIFMANRMLGNPKQK

SEQ ID NO: 4325 - protein, 173 aa, Enterococcus faecalis
GGRDMSINEIIMYIMVLFMIIGGIDKCIGNKLGLGEQFEEGIMAMGSLALSMVGIITLAPVLANLLSPIVVPVYELLGADPAMFATTLLANDMGGFALAQQLANDPQAGLFAGAILGNDGTNVSLYNSSSAWHYPKRRPTILSNRCFERDYYNSFWFISRWFNSWHAIVIDYS

SEQ ID NO: 4326 - protein, 91 aa, Enterococcus faecalis
GGKTMLLGKMNGSLWSTRKDEKLNGWKFMMVDILNQEDEKQGFLIDADNAGAGVGDKVLISQGNAARISAEDPNVPIDAMIVGVIDSTAEE

SEQ ID NO: 4327 - protein, 205 aa, Enterococcus faecalis
VKGGKTMNVSEMENLIQQITDQICQQLLSSSYSVALAEAKEAFPEEMFVRFPDVNWVTKEQKLARGLVVKRLTISQVNAIAHLQETDELVKNILAFLFEGKPVLVLTPIPSVSKNSRLKYRLKQTIQENVDMCQQFGLIIYNDSENYDVFQAACQKQIRSMAETKRTYISEKQLIRMTESGVSLSKNAYLTPLAKDYARKHQLLT

SEQ ID NO: 4328 - protein, 212 aa, Enterococcus faecalis
EMNKLDSMNEIVEEVVKRIQQQQQNTFEVEASGRHVHLSRQEIDALFGPGYQLTKVKDLSQPGQFVCKERITVAGPKGLFQNVVILGPERSESQVEVSMTDTRILGINAPVRESGKTEGTPGVTLMNGSAVVTLSHGLIVAKRHIHMTPEDALKNKVSNSQIVQVKVEGTRPLIFDDVVVRISPRFATYMHIDYDEANACGLTKGARGYILK

SEQ ID NO: 4329 - protein, 201 aa, Enterococcus faecalis
VHYFCPKLSLRRGVMTVITEDMLRIKRLKKELEDGTDFVFPVGSFLTPAAKSYLREHRINSSFSSTNPLLSEVHSVKASSQKQEHLSKETIYEIRHLSHLLYLPFLTNEALSTEGWLYFEQQQQWLEKFILEQSLVMEPVILESKVTILTNQQRQWRYSSKEIQLQLDKIILQLKGESQLFGLFQAWATELISTMAEISRN

SEQ ID NO: 4330 - protein, 87 aa, Enterococcus faecalis
ARNRGLVGAVETADAMVKAANVTLIGKEQVGGGLVTVMVRGDVGAVKAATDAGAAAAERVGELLSVHVIPRPHTEVDAILPHATTEL

SEQ ID NO: 4331 - protein, 538 aa, Enterococcus faecalis
RKRFSIRRTYMANDKIVIHGARAHNLKNIDVTIPRDKMVVVTGLSGSGKSSLAFDTLYAEGQRRYVESLSAYARQFLGQMDKPDVDSIDGLSPAISIDQKTTSKNPRSTVGTVTEINDYLRLLFARVGHPICPNDHIEITSQSVEQMVDKVLELPERTKIQILAPVVVKKKGQHKKVFEMIQREGYVRMRVDGETYDVSEAPELEKNKKHDIAIVIDRIVVKEGIRSRLFDSFEAALRLAEGYAIVDVIGQEEMLFSEHYACPYCGFTVGELEPRLFSFNAPFGACPDCDGLGVKLEVDKDLVIPDPTKTLREGAIVPWNPISSQYYPQMLEQAATSFGIDMDTPFEELPADQQEIILNGSGEKNFHFHYENDFGGVRDVEVPFEGILKNIKRRYHETNSDFTRDQMRLYMTELTCRSCQGYRLNPQALAVKINGTHIGEVSELAIKNAVQFFEGVSLSEQETTIARPILKEVEDRLTFLKNVGLDYLTLSRAAGTLSGGEAQRIRLATQIGSNLSGVFYILVFHQACASTSILTTGC

SEQ ID NO: 4332 - protein, 394 aa, Enterococcus faecalis
LEARLKVLRSENKLLEAQRLEQRTNYDIEMMREMGYTSGIENYSRHMDGRQEGEPPYTLLDFFPDDFLLVIDESHVTMPQIRGMYNGDRARKQMLVDYGFRLPSALDNRPLRLEEFEQHVNQIVYVSATPGPYEMEQTETVVQQIIRPTGLLDPEVEIRPIMGQIDDLVGEIHERIEKDQRVFVTTLTKKMAEDLTDYFKELGLKVKYLHSDIKTLERTEIIRDLRLGEFDILIGINLLREGIDVPEVSLIAILDADKEGFLRSERSLVQTMGRAARNAEGKVIMYADKITDSMQRAMDETARRRAIQEAYNEEHGIEPKTIIKEIRDLISISKTADKDETVVQLDKSYKDLSRQEKADLLMKLEREMKDAAKALDFETAATLRDTILELKAAK

SEQ ID NO: 4333 - protein, 248 aa, Enterococcus faecalis
PFLVKAWLMVSKVGQEAQILLGATGTGKTFTISNVIQEVNKPTLVIAHNKTLAGQLYGEFKEFFPDNAVEYFVSYYDYYQPEAYVPSSDTYIEKDSSINDEIDKLRHSATSSLLERNDVIVVASVSCIFGLGDPREYSQQVVSLRVGMEMDRNELLKSLVDIQFERNDIDFQRGRFRVRGDVVEIFPASRDEHALRVEFFGDEIDRIREVDALTGEIVGETEHVAIFPATHFVTNEEHMEHAISQIQE

SEQ ID NO: 4334 - protein, 211 aa, Enterococcus faecalis
LPPVVKTSERELALKFDVSRMTLRQAIQTLADEGILERKIGSGTYVARKKVQETMTGTTSFTEITLSQNRVPSSRTVSYFVAKPSSSEMEKLQLGPEDSILRMERIRFADDIPICFEVASIPYSLVSQYGKSEITNSFYKTLEAKSGHKIGHSNQTISAVQASEQIAEYLEIKRGDAILRVRQVSYFENGLPFEYVRTQYAGSRFEFYLEK

SEQ ID NO: 4335 - protein, 213 aa, Enterococcus faecalis
EYSSKSCHIAIGITKDGDREIIGFMIQSGESEETWTTFFEYLKERGLQGTELVISDAHKGLVSAIRKSFTNVSWQRCQVHFLRNIFTTIPKKNSKSFREAVKGIFKFTDINLAREAKNRLIHDYIDQPKYSKACASLDDGFEDAFQYTVQGNSHNRLKSTNLIERLNQEVRRREKIIRIFPNQTSANRLIGAVLMDLHDEWIYSSRKYINFDK

SEQ ID NO: 4336 - protein, 120 aa, Enterococcus faecalis
GNHFTVVGKVEAFANCFGVHYPGESVLRLNVGCFSKGIVLLMVGNIPSLGVVIPNLVSLRYGDHMKNTLWLTGICGSLFLLICDILARVLIAPYEIPVSVVVGTLGSILFILLLLRGRKQ

SEQ ID NO: 4337 - protein, 150 aa, Enterococcus faecalis
NSCQRGCRNIREHFVHFIITKGAQTMKRPLKKWLSLLLLLAAVVIVSLCYLTYNTYGNWSFALALRGKKLLAFIFVGIAAAFSTISFQTVTQNHFLTPNILGMDSLYVFVQTVLFFLLGGAQALGQVSLGSFLMNVFLMVFLSTSLSYFL

SEQ ID NO: 4338 - protein, 195 aa, Enterococcus faecalis
RKNQSNLFLLLMIGMILGTFFSSISTFLQVIMDPNEYDLLQGKLFASFGNVNSQYLIFVGVAVLIICGILWRESYRLDVLHLGNHQAQNLGIAVSQFQLVLLCLISSLVGLSTALVGPITFLGFIVANMSYQFMKTYRHRELFVAGSLIAVFLLVFGQLMVEQVFHLNTPLSVVIQFVGGVYFIWKIIAERKQRT

SEQ ID NO: 4339 - protein, 121 aa, Enterococcus faecalis
TGLSFEYPAQCGDSICWGRLFYMENYCRKEATHMIQMSDVSKKYGDKFVVSDIDLPISEGKLTAFIGPNGAGKSTLLAMMSRLIPKDTGGSLSGQARSKNLEAIGFFTKNCPFRTSQRCTT

SEQ ID NO: 4340 - protein, 61 aa, Enterococcus faecalis
FPKIPGEVYLDKQEVKTWKQSAFSQKIALLEQANGVQLKLTVRELVNFGSFSLFQRSLKKR

SEQ ID NO: 4341 - protein, 161 aa, Enterococcus faecalis
LCENWSILGRFPYSKGRLKSADHEKVTEALEQLGLTEMAEEYIDTLSGGQLQRAYIAMILAQDTDYILLDEPLNNLDMNYAVQMMQILKRLVDELGKTILIVLHDINFAASYADEIVAMKGGKLYAHGATEEVIQTSILNDLYEMNIRICEIEGKRFCLYH

SEQ ID NO: 4342 - protein, 327 aa, Enterococcus faecalis
RFWRKRMKKKFLAMMAVSMMGLLMLSACQTNKKTADSATTETTAKTEVTVKDTNGQLTVPKNPKKVVVFDNGSLDTMDALGVGDRVVGAPTKNIPAYLKKYQKVESAGGIKEPDLEKINQLKPDLIIISGRQQDYQEQLKAIAPTIYLAVDAKNPWASTKQNIETLGTIFDKEEVAKEKITGLEKEIADVKKQAEASANNALVVLVNEGQLSAYGKGSRFGLIHDTFGFKAADDKIEASTHGQSVSYEYVLEKNPGILFVVDRTKAIGGDDSKDNVAANELIQKTDAGKNDKVIMLQPDVWYLSGGGLESMHLMIEDVKKGLEYKKA

SEQ ID NO: 4343 - protein, 278 aa, Enterococcus faecalis
  MISC_FEATURE (144)..(272): Amino acids 144, 241, 262, 266 & 272 are Xaa wherein Xaa = any amino acid. 1
GGNNMKLGKKVVGLIATGFLLAACGGTKEAAEKVDSGNLAAEQKISISSPAPISTLDTTQTTDKNTFTMAQHLFEGLYRFDDDSATVPALAKDVKISDDGRKYHFTLREGIKWSNGEPITAQDFVYSWKKLVTPATIGPNAYLXDSVKNSFEIRNGEKSVDELGISAPNDKEFIVELKQAQPSFLAVVSIAWLAPQNQKFVEAQGKDYALDSEHLLYSGPFTLANWDATSDTWTLKKNPEXYDADQVKLEEVAGIPIKGALXWETXITRTDXQLFRRE

SEQ ID NO: 4344 - protein, 281 aa, Enterococcus faecalis
PGGFFIFGRKNIGGTHIHYRFDEQMALFEERGMQMTSKDVEKLKVIGYYRIKQFAAPLANKKIVNENTVYDYKGIYFSDVLKRYYQDKNLRIHLLHAIEKIEVALKTWVAFILGEQYGAFGYLNFSKWCDKNRYSKFEIEKRQFFFKKDLLRATSRSCTEDIKLKKNKEKDNFPSIWLAVEVLTFGELVRLVEIMSTRNKRKLSKMFRCTDIELLSWLKCINFVRNACAHNANVIDLQLETKPVCRSDWKDYLYNVNKSNNGNPFNKLAIVIFIIKTLVTP

SEQ ID NO: 4345 - protein, 67 aa, Enterococcus faecalis
SADCRIKKEREAMLAAIWAQDEQGVIGKEGKLPWHLPNDLKFCKEKTIHNTLVLGPCTFQTYWDVVR

SEQ ID NO: 4346 - protein, 325 aa, Enterococcus faecalis
IRGLRDGGNKMEEAYLALGKKILEEGHFKEDRTGTGTYSLFGYQMRFDLAKGFPLLTTKRVPFGLIKSELLWFLKGDTNIRYLLERNNHIWDEWAFERYVKSADYQGPDMTDFGHRVLQDPAFAEQYKEEHQKFCDAILNDAEFAEKYGELGNIYGAQWRHWETKDGSFIDQLANVIEMIKTNPDSRRLIVSAWNPEDVPSMALPPCHTMFQFYVNEGKLSCQLYQRSADVFLGVPFNIASYALLTHLIAHETGLEVGEFVHTLGDAHLYQNHVEQMQEQLSREVRSFPTLVLNPDKASVFDFDMEDIKVEGYDPHPTIKAPIAV

SEQ ID NO: 4347 - protein, 263 aa, Enterococcus faecalis
LAERILLESGIYSIGETFRIGYYTQQNEEMDPNQRMIAYLQEAAEEVKRSDGSSVGVAEMLERFLFPRFMHGTLIGKLSGGEKRRLYLLKLLISQPNVLLLDEPTNDLDIDTLTILEDYIQTFKGAVIAVSHDRYFLDKTMDKLLVFQGNGQILSFYGTMSEYLANQKEQEKVKEKPLNKPVKEASTEKKEKTKLTYMEQKEWATIEEDITQLETKLETLTEEMNHQGDDFVRLQELQEAVTATEQLLEEKMNRWEYLSEYAD

SEQ ID NO: 4348 - protein, 68 aa, Enterococcus faecalis
  MISC_FEATURE (44)..(44): Amino acid 44 is Xaa wherein Xaa = any amino acid.
FLSQRRPLNHPFFKNKNLFFLKKKGGGPTSPPFFGFRGGRDITXSPLGGGVKFYGGVFFSIQKTLFPP

SEQ ID NO: 4349 - protein, 100 aa, Enterococcus faecalis
KIKMIKYKWSGQTYNFRLIAEEITSVPPFICRFKPWKGSYFDFPFMAFLRKEHAMFKKLMIQLALVIGLSLTNPNNGCGLPLQAESIHFSFFFRVSRAKK

SEQ ID NO: 4350 - protein, 106 aa, Enterococcus faecalis
FRSLFMERYLNTITMLLSIFGGIVVRLLGGLDQLLDVFLFLIIVDFITGWIKAIATKELSSRIGMLGIAKKVTMLFVVAVAVRVEKVVGNNLPIREMVLIFYIANE

SEQ ID NO: 4351 - protein, 596 aa, Enterococcus faecalis
KLEECDEMSVEHIEELDTLNQGRLKINAILDQSNASAEKVDAYQVQLTNGISEAKNIADEAGKEAVQIATDAGNQANETANQAMNNAKTAIMIAGNAVSTANNNKQEFDTLRNDFDQLVAEAGDSNPEIVQARTDTQGIKQATLANRLQIDLNDRMTKADGISLLAKPTTVKMKLDFNGKTAGNTATNANSYSTDFTAKILKKPTEVWEEVSQADYNKMASRDDEGVKTGSTQSGVIPQQLAAFNLVEAAKKLIPQMFETVTTDEAVAFIRQNVQFFTINQRVKAAAPNNQTIKIATYLPTTDNWVTQIQESAKEFGDFSIQINDQNFITDEGFIYLMSYTDSSNGVTPASLEVDYVGLHIGLSVDAQAVLAKSGFVQAEQLNTHMENQDNPHQVTAEQVGLGNVENYGFASDSEAVAGTLTSKYMHPKNVAEAIKGQAVTQTGDQEIAGVKNFVTMPTVNGVPLESSRMAIYEASGVGEVEAKYQAAFNKDNMKFVLIRVGNRVDAFVRCNLSDPTKLNNNLVKVFTVPTGYTLSTKITKGIWNLALTAMQYTFPQPNCAGLYEMGNQGILFGANRAGNIYLQGSWYTDDPFPTK

SEQ ID NO: 4352 - protein, 295 aa, Enterococcus faecalis
SRGEQPMQLFGQAIMGLNPFNIEKIHEVMDKISAFAPAAKAAIDIACYDLMGQKAQLPLYQLLGGYDNQVITDITLRIDEPNVMAQKAVEKVKLGFDTLKIKVGTGIEADIARVKAIREAVGFDIKLRLDANQAWTPKDAVKAIQALADYQIELVEQPVKRRDLEGLKYVTSQVNTTIMADESCFDAQDALELVKKGTVDVINIKLMKCGGIHEALKINQICETAGIECMIGCMAEETTIGITAAAHLAAAQKNITRADLDATFGLETAPVTGGVSLEAKPLLELGEAAGLGISH

SEQ ID NO: 4353 - protein, 440 aa, Enterococcus faecalis
MKYDLKYLSVPLPEEIQRVKEFGDFASADIAIDFWLTKELPQALKERLIIEKDVIKMMRMNEYPHSFAKADQMMRDTFQDYQTEELIRLKETGLVDWVYIDGEPYFQLRFLANLIKTNAAYVARLREAESNQLEILRKKELKENIEQMQKNGGRKVRTTIKATIQVKKEFERPGERVRVHLPLPKACQQQSEIEILATSPEATYIAAEDAPQRTLCFETILKENQTFTVEYCYVNRMVYQQLEENNVDKMQPSFDLEEQLPHIRFTPYLRNLADEIVGDESNPLKKARLIYDFVTTKIHYSFMREYFTISNISDYAATNLKSDCGVQTILFITLCRIARNTPKWPSGLYVSTHYTGCHDWAQFYIKPYGWLFAELFLGGSAYENGINTVESVFGTFKFLRMFANSEIKADFNPPKMQLRADPIENQRGGFEYENEGLPYA

SEQ ID NO: 4354 - protein, 557 aa, Enterococcus faecalis
LTHRGNSMKKLKMMGIMLFVSTVLVGCGTTAETKIDEKATEKTSVSKKVLNLMENSEIGSMDSIFTQDEASINAQSNVFEGLYQLDEKDQLIPAAAKEMPEISEDGKRYTIKLREDGKWSNGDAVTANDFVFAWRKLANPKNQANYFFLLEGTILNGTAITKEEKAPEELGVKALDDYTLEVTLEKPVPYFTSLLAFSPFFPQNEAFVKEKGQAYGTSSEMIVSNGPFLMKNWDQSAMSWDFVRNPYYYDKEKVKSETIHFEVLKETNTVYNLYESGELDVAVLTGDFAKQNRDNPDYEAIERSKVYSLRLNQKRNEKPSIFANENVRKALAYALDKKSLVDNILADGSKEIYGYIPEKFVYNPETNEDFRQEAGALVKTDAKKAKEYLDKAKAELNGDVAIELLSRDGDSDRKVAEFIQGQLQETLPGLTINVKTVPLNNAIELMRKGDYELSVGMWGPDYQDPMTFLESSVSGNRMNYSSPTFDQLIEEATTKYANEPETRWQTLIKAEKVLVEEDAALIPLYQEARSQLVRPGVKGIQYHNFGATSTYKYAYKE

SEQ ID NO: 4355 - protein, 731 aa, Enterococcus faecalis
LMAEAYNEEVVALLQKELTTYRSKQITTVLTLLNEGNTVPFIARYRKEMTGSLDEVQIREIEERYHYLQNLKKRKEEVLRLIEEQGKLTKELKTDIQKAVKMQQVEDLYRPYKQKRRTKATIAKEKGLEPLADWLLSLPENADILAKAATFINEEKEVATAEIALQGAHEILAERISDEPKYRIWLRDYMVKHAQYVSVVKDEEKDEKRTYEMYYDFAEPVSKMVPHRVLATNRGEKEDILKVSLVADETKINDYFQRQLIGKQATSLAAPYIEAAYLDSYKRFIGPAIEREIRNELTEKADEQAIAIFGENLRNLLLQSPLKGKVVLGFDPAYRTGCKLAVVDETGKVLAIQVIYPHKPATAAKREAAGPAFKKIIEDYQVDMVAIGNGTASRESELFVAEQLKAVKRDVFYVIVNEAGASVYSASEVARKEFPDLQVEERSAVSIARRLQDPLAELVKIDPKAVGVGQYQHDVSQKRLAEQLDFVVETAVNQVGVDVNTASAQLLQHISGLNKTTAQNLVTYRDENGVFTARNQVKKVPRLGPKAFEQAIGFLRIPNGKNVLDNTGIHPESYPVAQAILEKAEIASKELGTAEAIEKLKQLPVNQLATELEVGSETLTDIIASLIQPGRDMRDEMSAPLLRKDVLTMEDLKPGMEMQGTVRNVIDFGAFVDIGVKQDGLVHISKLSTKFVKHPTDVVAVGDVVTVWVEDVDLKKGRISLTMLPRADRKE

SEQ ID NO: 4356 - protein, 248 aa, Enterococcus faecalis
EGLFMKPYVYVISDIHGQADLFDALLTDYDPVEHQLVLIGDLNDRGSDSKACFLKGKELVEQHGAVYLRGNHEEYFLQFLQNPEDWFAGYVRNGGKETIESLLHPGATAEYSPTEMALMIRSRYPELIDFLTKRPLYFEWQHYLFVHAGVDLTMEDWRQTAPKDFLWIREPFHQGKNNTGKTIVFGHTITPMLHGDMQTTDLWQSDGKIGIDGGAIFGGSVHGVIFNEKGIVQDIEYQKRTPAWQPEF

SEQ ID NO: 4357 - protein, 82 aa, Enterococcus faecalis
KMRLAVRRKNKPNESETKAVSSKCSSLSKAKLQRVIVGAAFVQLIILRFREWDISRFDLCPIFVFYFQTFYENILKFSVYLI

SEQ ID NO: 4358 - protein, 244 aa, Enterococcus faecalis
  MISC_FEATURE (2)..(7): Amino acids 2 & 7 are Xaa wherein Xaa = any amino acid.
GXWYNRXDTCATCGGNGAKPGTHPETCHKCHGSGTINVERQTPLGRMMSRQTCDVCHGTGKEIKEPCPTCHGTGHEKKAHTVKVNVPAGVEDGQQMRLANQGEAGTNGGPYGDLYVVFRVEDSDIFDRDGAEIYYDLPVSFVQAALGDEVTVPTVHGDVKLKIPAGTQTGTNFRLRGKGAPRLRGGGNGDQHVKVKLITPKNLNEEQKDALRAFAKAGGQNVTEQQEEGFFDKMKDAFGGKKKK

SEQ ID NO: 4359 - protein, 301 aa, Enterococcus faecalis
FIRLRYTESETKYHREVNPLNLIECLEQKERYTYNEGLIIDFILSHTERVLHMSIYELAEATNSSTSTIVRLCKKTETSGFKEFKIRLSRDLEIHYQAIRNVDANMPFLAQDSDLLIAKKIAQLTTETVQSTQQLLTEAMLNKSIDLLLTAENILAVGVSNSYIRLTDFQTKLLRIQLFIHLIPYQAEQFYLAINATKNDVAILVSYSGNTAEIVNEARIFAEGGTPIIAITSDLNSQLAKYATVILPIPNVEHADFKVSTFSSQLAIEYILNVLYSCIFSRNFDKNYTSQKNTPTSILKF

SEQ ID NO: 4360 - protein, 119 aa, Enterococcus faecalis
SVLFFTIGKTGFEPATPWSQTKCSTKLSYFPGYEVKVIKKDYRIKKKLTCTFLKLSQSLNYAPKGSRTPNLLIRSQTLYPVELWVLNIKQCRGPESNRYGDHSPQDFKSCASASSATPA

SEQ ID NO: 4361 - protein, 82 aa, Enterococcus faecalis
  MISC_FEATURE (21)..(36): Amino acids 21, 28 & 36 are Xaa wherein Xaa = any amino acid.
RGINCKNETKKSKIIYICKRXTCFFEWXCGCLVYRXFEIVEATTIVMTNLLNEKYLPLGGAIDDWKNVSKICVPIVPYKNSP

SEQ ID NO: 4362 - protein, 359 aa, Enterococcus faecalis
TKFLVKETFQVIFFLPLIFKEGKLPADFQKNQKDRSFYASDIGHIEGYIRQIVTKAKAKGFTPQDIQVLAPMYRGAAGIDALNKMMQEIFNPNDGKKKEVKWNDTVYRIGDKVLQLVNTPELNVFNGDMGEIVGITLAKDSEDKVDELVLQFDNNEVTYKRNEWNKITLSYCCSIHKAQGSEFRMVLLPMVHQYSRMLQRNLLYTAVTRSKELLILLGEVSAFETCVKNESASRMTMLKERIVNAEQMTLTTRTQLEAYEEGLTADHPFTETETKAVFYETEQQSTKADQIKETDEQLVDTTVQEVSLFADEGEESTSPAEPQKEEQLPENPVLSIQEIQENKINPMIGMAGTTPYQFM

SEQ ID NO: 4363 - protein, 539 aa, Enterococcus faecalis
RKSTISTQHKGGLVVVTLFGEDEEKAFIVGTVQAIFFENPSNFYKVVLVNVTDTNTDYLEKEIVVTGSFGQVQEEEPYRFFGHFVDHPRYGRQFQVDSYQQERPTSASGVVNYLSSDKFPGIGKRTAEKIVEVLGESAIDRIIDDPSVLEEVTVLNEKKRQVIVETIRLNHGMEQVIVGLNRYGFGSQLAFSIYQTYQEETLSVIQENPYQLVEDIEGVGFKRADNIAEQIGIQADSAVRIRAAILHEVFEHSIRSGNTYVQADVLLEEAIRTLEASRPVEISPDQVANEIITLVEHGKIQQEETKLFENSLYFSEWGIGTSIQRLLSRKKEIHYEEEEVQKNIRMIEKRLNIQYGDSQQAAIEEAIKSPLFILTGGPGTGKTTVINGIVSLFAELNGLSLDLKDYTQEMFPILLAAPTGRAAKRMNETTGLPASTIHRLLGLTGREKNPSLTAKELEGGLLIVDEMSMVDTWLANTLLKAIPTNMQVIFVGDKDQLPSVGPGQVLHDLLQINEIPKCELNEISRQGDVSSNILLAPDI

SEQ ID NO: 4364 - protein, 776 aa, Enterococcus faecalis
  MISC_FEATURE (5)..(5): Amino acid 5 is Xaa wherein Xaa = any amino acid.
IKSTXKKGLSTEEVAKQKELGLQNNYEENVAKSTKDIIFDNVMTLFNFLNFAIAVCLLFVGAYSNLAFLAIIIVNMSIGIFQEIHARNLVQKLSIVAKENVHVVRNGVQQEIDTKELVMEDIVIISAGEQVPSDMEVIDGKVEANEALLTGESDLIEKEIGDTLLSGSFIVSGQAYARVIHVGAENYAVKITQEAKVHKPIQSELVNSIRKVSKFTSWVIIPLGIILFVEAFWLRDAGIKTSVVASSAALLGMLPKGLVLLISIALTTGVIKLAKKRILVQDMYSIETLAHVDTLCLDKTGTITEGKMKVQKAIILHDKYEELFPQIIGSYLSESTDNNITMQAIRDHYEVSNRFGAKEVLAFSSERKWGAIEFPEIGTVYLGAPERLVDDSRLPEAVFTAQENGYRVLMLAIAEQQPLNETKMPYLEPLAILEIDDPIRQNAKETLAYLKEEGIDLKVISGDNPVTVSNIARRAGLPGYESYIDLSTKTTEAEVREAVQQYTVFGRVSPQQKRTIVRELKDTEHVVAMTGDGVNDVLALREADCSIAMAEGDGATRQISNLVLLDSDFTTLPDVLFEGRRVVNNVTRVSSVFFIKTIYSFILSIICALTAIAFPFIPIQVTLIDLAIEGYPAFFLSFEGDKRKVVGKFLPTALKNASVNALLVVANIIAVYLIGQNQGFSSLDTTTLMYYLLVGISCMAVVRACLPLNPLRIFLVFSTIIGIYVAAMLFHNILEIGFLTSQTMGLFFIMMAINIVVRVTIGFVQMKRAGKTIKDL

SEQ ID NO: 4365 - protein, 603 aa, Enterococcus faecalis
EVRTMAQRIPQEVIEEVRHRTNIVDIIGQYVQLKKSGKNYMGLCPFHEERSPSFSVAEDKQIFHCFGCGKGGTVFNFLQEIEGISFPESVKRVADLEHLSVDFDWSEPREVADTPENQQRRSLLQLHSKAAELYHHILVNTKIGEPALNYLLERGLTQELIETFQIGFAPQKRDFLSQVFKNEQLDETLFEPSGLFVQRDNGTFLDRFYQRIMFPINDPQGNVIAFSGRLLKTADFPGDEMPKYLNSPETTLFNKRETLFNFDRARKEIRKENTVLLFEGFMDVIAAWQSGVKSGVASMGTSLTNEQIRRLERVAKEVVICYDGDNAGVQATNRAIQLLQENSHFDLSIVSIPEKLDPDEYVRKYGAEAFQNLANHGRETVFSFKMNYHRLTRNMNNEKEQLDYVNELLRELTNVQSPLERDRYLNQIAQEFQLSVHSLEEQFNQLKQEQRSVQRQERQQFYQDEMMPPPMEEPVFEENHVQNKLPLTQVQKAERSLLFRLMNEQGVRQTIQQLPDFSFAHDEYQELYFLLESYATLHQSFDIADFINFLQDNQTKQLAIEIAYQNLSEESSEREVADLLHVIALSSIAEAIEQKQILHLTTA

SEQ ID NO: 4366 - protein, 338 aa, Enterococcus faecalis
LAPHWPRGRSSKSQIRKTFPEMFFLNVNGGRKMDTKKRPIIIDTDPGIDDAVALAIALNHPNLEVRLITTVAGNVDVEKTTNNALKLVDFFGKKVPVAKGCNCPLLIQLEDSAEIHGETGMDGFEFPQPISTCLDIHAVEAMRKEILSSDVPLTIVPIAALTNIALLLTLYPEVKENIAEIVMMGGSLARGNTNTSAEFNTYVDPHAAQIVFQSGVPLTMVGLDVTSQAVLTNHEVTAIRALGRVGEMFYGLFRHYRGGSLTTGLKMHDVCAIAYLTSPELFETTETFIEVALEGPAAGATVADLKMKYHKNTNAVACIDVNVEAFQKWVVEKMKAVN

SEQ ID NO: 4367 - protein, 461 aa, Enterococcus faecalis
RRISMIESLLVLVVLVVVAYLIVKNYHPALSLIIGALVLLACAWMLGHPIYPAGEGTGFGLFDIFLKFKDTIIAQVSSAGIVIMILFGYSGYMNAIGANQMAVNFLVKPLMKIKRKSLFVPVVFLIGNLMSLVVPSASSLAIILMSILYPMLASMGISSLTAAGVIAMTATIMPTPLGADNVIAANTLGYDVLNYVVWNAKISLPSLLIIAVAQYFWQKYCDKKEGEAAYVSLNEEGLSKQKEFDVPKFYAILPILPLLLIVGVGIAGMFIKGITMDIFVLTFISFFIAVLVETLRLKSFKKVQDTAVEMFKGMGQGFSQVVMLVVCGSLFTSAIQTLGIIDSIMASVEASSSAGIVTTLIFSGATTLFGILSGGGLAMFYAVIELIPGIAEKAGIDGILISLPMQMIANLTRTISPVAAVVMIVASTVGVSPIRILKRTSVPTIIGIISVIVLSILLLPY

SEQ ID NO: 4368 - protein, 163 aa, Enterococcus faecalis
TMKIRVADEKELPMILQFLTEVKAYMDVVGITQWTKDYPSQGDIQEDITKKRLYLLVHEEMIFSMATFCMEQEQDFVWLKRFATSPNYIAKGYGSLLFHELEKRAVWEGRRKMYAQTNHTNHRMIRFFESKGFTKIHESLQMNRLDFGSFYLYVKELENQSIV

SEQ ID NO: 4369 - protein, 365 aa, Enterococcus faecalis
QHDIKAVSIKRECVENQWEELGSKEPIFSRYHKLEEPSQGIDKIALDTTQGRLTEATLLLEETSPTYLALSQKGELFSVTSVDGEGGTAAYQPEMDHFNLLNKVTEEGAPPCYVAVDENRQLVYAANYHQGIVHVYRILKDGSLEDADKVIHTEPTGPHENQNNAHVHYTDLTPDQRLVVCDLGTDRVYTYNVSLDGKLSEIAQFVTEPGTGPRHLVFHPTKSLAYLFGELDSTVSVLSYDETDGSFTELQKVSTLPADYDAFNGGAAIRISSDGRFLYASNRGHNSIAVYAVSENGEAIERIQLISTEGDIPRDFDLDPSEDFIVVANQDSDNLTLYRRNQETGLLEMIQKDVAVPECVCVLFV

SEQ ID NO: 4370 - protein, 155 aa, Enterococcus faecalis
TGVKEMKVIFLQDVKGKGKKGDVKEVPTGYAQNFLIKNGYAKEANKGSMSALAGQKKAQEKHEAEVLAQAKEMQAFLEDEKTVVEIKAKAGEDSRLFGSIPSKQIAEALNKQYNVKLDKRKIELANPIRSVGYTNVPVKLHHEVTAKIKLHVVAE

SEQ ID NO: 4371 - protein, 681 aa, Enterococcus faecalis
ITRAICSLEQVASKVCRKIGGKKMQKKRIQKNGFLIVVGLLLVEFLLYFLLTNKWLLLAVIIALDIFLLVVIRLLIRDVEITNVEKIQEASSIAEQSLDYVVNEVPVGIITYNGETRAVEWLNPYAASIFNKDNQLTLTASQVTSYLELAERNQDIFTIDENTYRFSVNKEQHTITFEDITKESNLYQEKVEMQTAIGIVSVDNYDDVTDTMDEKEISYLNSFITTMVSDWMDQYKVFYKRINAERYFFIAQWEDIQKMMDEKFSILDTIRKESANHEVAITLSMGIAYGGPTLDQTGTTAQTNLDTALVRGGDQVVVKEAKDEAKPLFFGGKTAVTTKRSQVRSRAMSMAIKGIIAESADIYIMGHRYPDMDALGSAFGVARLASFNNRKAWIVLDENEIIPDVKRVLEAIKEYPELEERIISPKEAMKRKKESSLLVMVDYHKPSLSISQELYERFDKVVIIDHHRRGDEFPAKPLLSYIESSASSASELVTELIEYQSNSANKLQAFEATMMLAGIVVDTKSFNTRTTARTFDVASYLRTCGADSSLVQYLLSSDLTSYLEMNNLISKSEYVTKDTVVVAGSEDKEYDSVTAAKTADTLLSMAGINAAFVITKRTDQQIGISARSNGSINVQIIMENLGGGGHFTNAAVQLSNVTVAEVKEQLLDVIRQNINEMYEQE

SEQ ID NO: 4372 - protein, 83 aa, Enterococcus faecalis
EGTRMAQQRRGGRKRRKVDYIAANHIEYIDYKDTELLKRFISERGKILPRRVTGTGAKNQRKLTIAIKRARIMGLLPFVSDEQ

SEQ ID NO: 4373 - protein, 188 aa, Enterococcus faecalis
MINNVVLVGRLTKDPDLRYTASGSAVATFTLAVNRNFTNQNGDREADFINCVIWRKPAETMANYARKGTLLGVVGRIQTRNYENQQGQRVYVTEVVCENFQLLESRSASEQRGTGGGSFNNNENGYQSQNRSFGNNNASSGFNNNNNSFNPSSSQSQNNNGMPDFDKDSDPFGGSGSSIDISDDDLPF

SEQ ID NO: 4374 - protein, 102 aa, Enterococcus faecalis
KSSSQDTKYEIMYIIRPNIDEEAKTALVERFDTILKDNGAEVIESKDWEKRRLAYEMNGFREGIYHIVNVTSPSTAGAINEFDRLAKINDDIIRHMIVKVEA

SEQ ID NO: 4375 - protein, 549 aa, Enterococcus faecalis
  MISC_FEATURE (73)..(73): Amino acid 73 is Xaa wherein Xaa = any amino acid.
PNDAFTIQNNNFYLSSQELLKSESLKNDRFYNFLLKEYADLKKLTLSTEDALAIMQNKVEQLYDMDIFAQEPXAIEAIDETLQPKIQEAIVFFEQLIQEKLTEDFQNILIVHLYSAVFYSAQMNETFYSDTKNIYSGKVTQYQAAKTMVDFLQTLFGISFADTEILFFDLFIRKVTAKKRAHSDEENCGVIVVAHGAATASSMVEYTNLLFSTTVMRAVDMPINQSVEETLEKVRTIVKQNQYKKIILMVDIGSLVYFGNAISQKFQREVLLISNINLLTLLEVAREVIYESTAFEYLLPVLKEKNHRALICSKGRFNEAKVLIISCLTGMGTAIKIEQLLLKTFPNELLTNVRIITLEKREVEDIDRLHSFVRKEEKIVGIIGTVKTEVPDIPFISLQDLLSKRGIQLVFELLGHHLEEKQNQELLKKVSAKYIQGLSIEAITDLLTVLNPTTISIELAKIYSDICLQTKIKSDEKILLRFIIHCACMLERQLLNPEYDPTAYEVSYRELPEAVSVIKMAFRPLEVSYNLLIPPLEVRYIYELLFEKA

SEQ ID NO: 4376 - protein, 138 aa, Enterococcus faecalis
QRSLFMENEPILLLTHNGWGLELVKSVQMIVGEVTNVHEVALQAEDSLGDYLERVTEKIDQLTWHNQLLILTDVKGGTPSNVALRLSKDYDLLIVSGLCTSLLLESVMKQSGPGFRLEDAEMIQQAAVDSCQILEIPK

SEQ ID NO: 4377 - protein, 175 aa, Enterococcus faecalis
KFQNKKVQVNRMSKIVLTRVDSRLIHGQVVTKWLQQSGANEILVVSDELEQDEFLQSIYLMAAPPGVSVVIKGIESAKEYWESQEKEEKKVLFLVPDLTTLKAMVDQEIIKEEIQVGGLGGGPNRKNVLKNINLSEEDVAILTELLTKGIHVFFQAIPEENPLPIQKLIEKYQSL

SEQ ID NO: 4378 - protein, 263 aa, Enterococcus faecalis
KISITIIREKGENHMGVLGVSIIMGLYYWFARLRFGYTFSGMLSQPLGAALVAGLATGKLSEAMVVGAGIQLVYLGVTSTPGGNVPSDPALASAIAIPIALGVGMNAEAAVALAVPFGVLGVFMDQLRRTINATWVHMADKYAEELNYGGIYRAAFVYPALAGFLIRFPVVFAANFFGQSVVNKVLEVIPAWLMHGFEVMGGILPALGFALTIMVIGKKNLIPYFLIGFVAVVYFGAEVMAVAILGICIAFLVRNKALSEEAA

SEQ ID NO: 4379 - protein, 228 aa, Enterococcus faecalis
GGSIMEQMTQANEQQLEQKKITKKELSKAFWIYQLGCELSNSYERLQSLVFCASMIPAIKKLYADDEEQQREALKRHLNFFNTEGTVGASIQGIAIAMEEEKSNGAAISDTAITSIKTGLMGPLAGIGDSIIWAALMPLIISIFIPMAKGGNVIGSIGPLVLYTAITLYISWTLVNKSYTLGRNSILSLLKDGKIKQVIYSANVLGMMMMGALSASYVKIASPMTCKV

SEQ ID NO: 4380 - protein, 110 aa, Enterococcus faecalis
CGNETPLQLSRKIYCHFRKGSFQLMLQTALHFSHQLLKEVVEPGDFVIDATMGNGHDTAFLAELVGPSGEVFAFDIQKEALINTEQKLTELNLLPQSTLFPLGRRSPRDG

SEQ ID NO: 4381 - protein, 122 aa, Enterococcus faecalis
GETPAMMREHVRRTIQDSDIQGIKLHLLHLMTNTKMMRDYNEGRLQLMSKEAYVSVICDQLEMIPPEIVIHRLTGDAPFETIIGPMWSLKKWEVLNAIDAEMKRRYSYQGKYTVISGKEVFN

SEQ ID NO: 4382 - protein, 402 aa, Enterococcus faecalis
AMTTHEKVILVGVETEKNYQTFSASMEELANLTETANGEVVFVLTQKRPQVDRQTVIGKGKLEELIQLTDAYEADLVIFNHELTPRQNQLLSEALAVRVIDRVQLILDIFALRARSKEGKLQVELAQLDYLLPRLAGQGKQLSRLGGGIGTRGPGETKLESDRRHIRNKILGIRRELKEVTAHRERSRQKRQNSELFQIGLIGYTNAGKSIILNMLTTAGTYSEDQLFATLDPLTKKWQLPQGMEVTLTDTVGFIQDLPTQLIEAFQSTLEESRTMDLLLHVVDASAPDRLQHERTVQTLMKELALENIPCLTVYNKRDQVDSKEFVPTLFPNVLISTKISEDKERLVQAIRAQMMELLEPYQLEISPTDGQLLSELRRMTLMISEEYAENENRSLHHEVRN

SEQ ID NO: 4383 - protein, 311 aa, Enterococcus faecalis
LEKVLVIVGPTAVGENSIKYCFCQKILMVKLISGDSMQVYPLVRLWPRLKSTGTEKEGFPHYLIDCQEVSETYSAADFQKEVRQKIKEITEKGKLPIIVGGTGLYIQSLLYDFQLGSREIDDSPEIRETYNLFAEEKGNQALWLLLQQKDPLAANSIHFNNRKKVIRALEVFDKTGYSILTPKEKPARLYDYYLLGLETDRALLYERINQRVDQMMTEGLLEEAKQMFQQPHAQAAQGIGYKEFFPYFSGEQSLEMAVETVKQQSRRYAKRQLTWFRNRMAAHWWNLVQQPTDLPKLEKEVAEWLQQKESE

SEQ ID NO: 4384 - protein, 213 aa, Enterococcus faecalis
NFHQFKNGYLIVMHDETVDRTTDGHGEIQQLTLNELKQLDAGSWFQKNPSVQCVPTLEDVLNCLVEEQFNGFLNIELKTDIIHYEGIEKKIVQQMKQKNWPFRYLYSSFYFPSLVKLKKADPKTEIAFIYESAEDLSQAGPAFALVDSLHPKMSWVLAHEKELITIGKPLRPWTVNRMEEMENCFQLKLAGVHTDFPEEAKFARQNWLEEGET

SEQ ID NO: 4385 - protein, 566 aa, Enterococcus faecalis
YRYKTKSWMTILIDEYNQYMTWTGRSVVHVIARIFLLLPKGIFNVFNALAYTIVTYLVYRLTLQKQDKKYNSFKFIIIQVLFWLFTPAFGEVFLWETGSANYLWGSLIILSFLYVYHREIIEEHVFTKTKLMIFLMFALGILAGWCNENTSGGALLIVLGYLGWQFYTKRKLSLWMFTGVAGNTIGLALMALAPGNKIRATYFARSTWSLPRKLMTGIITIFEQMKEHLSLFLLILILLLVLYAYISQDKKRVYLSVVYFISGMATMLVLAISPAALDYGRSYYGAVLFLIIAFSMSLPNYKVNIRFSPIYSVLYVILVCTFFMNVMVGVSDVFLSKLDLTKQYSYLVEQEKKGNINPVFPDISYSNTTKYSAYSNHLSHVKTNSDAQVNRSVAKYYGLESVRSVSEKDWDNIYRNGNPELMNIFNLNDYLQKLIDTQYTILLSGYGNQVYLSQAEESLLKDLGVDVKFEGNNAWTLSAVISKDNKTFETNAELSRLTGKIEALNYDVFSSYTNYENQTFASVKINDTEMSRNKKGLNFVIIDSNTNKVIDSVNFDITEKNAPGMR

SEQ ID NO: 4386 - protein, 343 aa, Enterococcus faecalis
YLMKKTTGILLSIAVLAMLIGGSGAVYYYKQAEKSVTPLKESYTLKNKQAGEELHLSLKGKGPYTIYKTDSNKMGLRSPNNAFYSKAEGTLDVKEEKNKITATINTTRTQNQSELSFFNIGIFSDFTPNVSVQIPNNVKKLVIDGSTHSPVSLNAFNVDELTTNLPNSYVSLSGVKAKKMTLNSSDGIYLSADTSAKTATVETTDGDITLDSAYFDEIKNTTTSGDIRVQNARGNIQATTTDGDISVYDFKGEANFSSENGDFSLDMPAVPKKLTVALVHGDIYVNSGEILRNISIKGESKLGDVQLLNKERTSYKNGRADTEFNLSSEFGDITVDTPDDDNQ

SEQ ID NO: 4387 - protein, 229 aa, Enterococcus faecalis
EMNRVERGSGMNKEHFIIELKIYLKALNPKDQAIILAKYKALFDARVAEGETEEQVAKSLGKPRVIAEEILKEQGIELTERKIENNGWQEIPAATPAYDHPYEEESEFYYDNDSPYYQRPQHRPLTRFFQVLGIFCLNFFFMFWVILGIALMYVGCGIAGAATLFSPIYGIYSVITQANAASFFQLSMSLFLFGASIIGWLLFLPILKFSAHVFKRYFQWNIAVLRGDI

SEQ ID NO: 4388 - protein, 477 aa, Enterococcus faecalis
VNKMDQWWKNAVGYQIYPRSFKDSNGDGIGDLQGIIEKLPYLKELGVDFLWLNPIYTSPNVDNGYDIADYQGIQPEFGTMEDFQELLDQAHQLGLKIILDLVVNHTSDQHPWFVEAKKSLDNPYREYYLWADATPDRMPNEWQSFFGGSTWTYDEGTKQAYFHVFAKEQPDLNWKNPKVREEIYAMIRWWLDLGIDGFRLDAISHIQKEPWDFKITTNPWAPFMNVKGIEDYMLDLKVIFAEYDIMTVGEASGVSSKKAVEWTNDAGYLNMIFELEHNVREGKPGEERLNILGYKKVMARWQKHLGTEGWNALYVENHDNPRINSILGNETSHSAKAIGTIALLLRGTPFIYQGQEIGMVNYPFQQIDELDAKDSHNHYRLLIESGYDAKQALKEVAHWTRDHSRTPMQWTSQEASSFTSGHPWLAIHPNFKEINVADQETDAQSVLNYYKKLIALRKDNPVFTDGQFQLLAPNHQL

SEQ ID NO: 4389 - protein, 400 aa, Enterococcus faecalis
NLPFSGSAWTFDEASGQYYLHLFSKKQPDLNWGNQQMRQSVYEMMNFWIDKGIGGFRLDVIDLVGKIPGEEITANGPHLHRYLQEMNAATFGGKELLTVGETWGATPEIAKMYSSPERHELSMIFQFEHMSLDQQPGKEKWDLQPMEVAKLKQVFAKWQTELGNDGWNSLFWNNHDLPRMISRWGNDQEYWLESSKLFAILLHMMKGTPYIYQGEEIGMTNTPITDIREARDIETINMYHEYLEKGYSKEEILLKINTKGRDNARRPMQWTAEKNAGFTTGTPWIDVNPNYQTINVAAALADKNSLFYTYQEMIRLRKEHPLIVWGNFELLETVEEVISFYRTYGEERWLVVTNFSDKVQPFSADVSVEQVMIENMPTDVTALADYSLAPWQAFVVKVSQ

SEQ ID NO: 4390 - protein, 67 aa, Enterococcus faecalis
GNRKSEKIEIIMDLVVNHTSDEHRWFIEAKKSKENPYRDYYVWADPASDGGAPNRLKSALFGFGVDV

SEQ ID NO: 4391 - protein, 101 aa, Enterococcus faecalis
RRMEKHWWQEVVVYQIYPRSFKDSNGDGIGDLPGIIEKLDYLETLGIGAIWLSPVYQSPNDDNGYDISDYEAIMTEFGTMADMDRLIEGIEKAKRLKLLWT

SEQ ID NO: 4392 - protein, 486 aa, Enterococcus faecalis
KPSFKRKYLEMANNYFRMPYFHEIDRFKAPEWVKETVWYQIFPERFANGDLANDPEGTLPWGSKRPDRQDFFGGDLQGVLDHLDYIEDLGVNGLYFCPIFEAFSNHKYDTIDYLKIDPAFGDGATFKRLVEECHRRGIKIMLDAVFNHMGDTSPQWQDVLKNGQDSIYADWFHVNEFPASYEESADFEEASNITYDTFAFTPHMPKLNTANPEVQAYLLEIARYWIEEYDIDAWRLHVANEVDHAFWKKFRQTCDDAKEDFYILGEIWHSSQSWLQGDEFHAVMNYAYTDAIMGYFVKQELSLEKMLSEMNNQLMLYRQQTNQMQFNVLDSHDTPRLLHETKEDKELMRQVLAFTYIQPGVPCLYYGDEIGMTGDMDPDCRRCMVWEENQQDLDLKEFVKSLIALRKKYAAVFSGGTIDWTGTSFETGLIRLACRLEEQTIYGIFNTGQETQFVDRTDREVLLSSSIEIASEQIMVLPKGFLLYQA

SEQ ID NO: 4393 - protein, 385 aa, Enterococcus faecalis
KLKTIMREEFEKIDAVEMLMPALLPAELWKESGRYETYGPNLYRLKDRNDRDYILGPTHEETFTELIRDEINSYKRLPLNLYQIQTKYRDEKRSRSGLLRGREFIMKDGYSFHADEASLDQSYRDYEKAYSRIFERCGLEFRAIIGDGGAMGGKDSKEFMAISEIGEDTICYSTESDYAANLEMATSLYTPKKSHETQLDLEKIATPEVGTIAEVANFFEVEPQRIIKSVLFIADEEPVMVLVRGDHDVNDVKLKNFLGADFLDEATEEDARRVLGAGFGSIGPVNVSEDVKIYADLAVQDLANAIVGANEDGYHLTNVNPDRDFQPISYEDLRFVQEGDPSPDGNGVLAFTKGIEIGHIFKLGTRYSDAMGATVLDEHGREKSM

SEQ ID NO: 4394 - protein, 292 aa, Enterococcus faecalis
KEEEETLYKIDQDARIIESDGTEVRIAPLDVQFQSAKLSPRILTNFAGPMNNFILGFILFTLAVFLQGGVTDLNTNQIGQVIPNGPAAEAGLKENDKVLSINNQKIKKYEDFTTIVQKNPEKPLTFVVERNGKEEQLTVTPEKQKVEKQTIGKVGVYPYMKTDLPSKLMGGIQDTLNSTTQIFKALGSLFTGFSLNKLGGPVMMFKLSEEASNAGVSTVVFLMAMLSMNLGIINLLPIPALDGGKIVLNIIEGVRGKPISPEKEGIITLIGFGFVMVLMVLVTWNDIQRFFF

SEQ ID NO: 4395 - protein, 148 aa, Enterococcus faecalis
TSVNEGRRTSMKTIITFIIVFGILVLVHEFGHFYFAKRAGILVREFAIGMGPKIFAHRGKDGTTYTIRLLPIGGYVRMAGMGEDMTEITPGMPLSVELNAVGNVVKINTSKKVQLPHSIPMEVIDFDLEKELFIKGLCQLKGGRRNPL

SEQ ID NO: 4396 - protein, 69 aa, Enterococcus faecalis
TINFSDSLSYFINTLIDMCYHESINSNFRGNESMYGELHGKVAVVTGAATGLGLFITLRYILEGHECGC

SEQ ID NO: 4397 - protein, 230 aa, Enterococcus faecalis
KGMNVVADYVGELPKEFEDVQAKHADRVKFVKADVSNEGDIKALAETALKEFGHVDIWVNNAGVEASFPTIDMPLKEWQRVIDVNLNGVFLGSREALRIFRDQKIKGSIINMSSVHQRIPWPTFAHYAASKGATEMFTKTIALEYAEYGIRANCIAPGAINTPINAEKFSDPEQLKQTTSMVPMGIIGKPNQVAAAAAWLASDESSYVTGTTLFVDGGMSLYPSFQHGAG

SEQ ID NO: 4398 - protein, 113 aa, Enterococcus faecalis
KVVCNKILYEFLLQTLYYHTQNLFRRLTMKLVKNVLLILIGLVIIGIGASTLRVAGLGVDPFTAMNIGLSSMFGMQLGIFQIIVNAFILFYVYLKNKNAIGLGTKLAIFTTMS

SEQ ID NO: 4399 - protein, 316 aa, Enterococcus faecalis
  MISC_FEATURE (9)..(9): Amino acid 9 is Xaa wherein Xaa = any amino acid.
IGMQSMGRXNLSETMGITERVLRTETDVLKQLNLIEPSKSGMTLTERGLEVYQGLELVMNQLLGMHQIEKEMTQYFGIQRCIVVAGDSDIQKKVLSDFGDVLTNTLNLLLPNGENTIAVMGGTTMAMVAENMGSLETEKRHNLFVPARGGIGEAVSVQANSISAVMANKTGGNYRALYVPEQLSRETYNSLLQEPSIQEVLTLISHANCVVHSIGRALHMAARRKMSDDEMVMLKQKNAVAESFGYFFDEEGKVVYKIPRIGLQLKNLQEIPYVVAIAGGKTKAKAIRAYMKNAPKQTWLITDEAAANEILKGVTL

SEQ ID NO: 4400 - protein, 346 aa, Enterococcus faecalis
NKKFLIFIRRKSLMTVKVGINGFGRIGRLAFRRIQDVEGIEVVAINDLTDAKMLAHLLKYDTTQGRFNGTVEVHEGSFNVNGKEIKVLANRNPEELPWGELGVDIVLECTGFFTSKEAAEKHLTAGAKRVVISAPGGNDVPTIVYNTNHETLTGEETVISGASCTTNCLAPMAKALHDNFGVVEGLMTTIHAYTGDQMTLDGPHPKGDFRRARAAAANIVPNSTGAAKAIGLVIPELNGKLDGAAQRVPVATGSLTELVTVLDKEVTVDEVNAVMEKAANESYGYNTDEIVSSDIVGMTYGSLFDATQTKVMTVGDKQLVKTVAWYDNEMSYTAQLVRTLEYFANL

SEQ ID NO: 4401 - protein, 426 aa, Enterococcus faecalis
NNKRGSNALLRFLFLKKRNPKIDNTGGLLMAKKKIKDVHLKDKKVLVRVDFNVPLKDGVITNDNRIVAALPTIKYVIENGGKAILLSHLACVKTVEDKAGKSLKPVAERLSELVGQPVTFVPETRGKELEDAVNNMKVGDVLVFENTRFEDVDGKKESGNDAELGKYWASLGDVFVNDAFGTAHRAHASNVGIASTGIPTVAGFLMEKEIKFIGEAVENPKRPFVAILGGAKVSDKIAVIENLIEKADKILIGGGMAYTFMKAQGYSVGLSLLEEDKVDLAKSLMEKAGDKLVLPVDTVVSKEFSNDAPFHTVPSTEIPDDEEGLDIGEKTIELFANELQGAKTVVWNGPMGVFEMSNFAKGTIGVCEAIANLEDATTIIGGGDSAAAAIQLGYENKFSHISTGGGASLELLEGKTLPGLASINDK

SEQ ID NO: 4402 - protein, 124 aa, Enterococcus faecalis
IAAAAESPPPMIVVASSKLAIASQTPIVPLAKLLISNTPIGPFQTTVFAPCNSLANNSIVFSPISKPSSSSGISVEGTVWKGASLLNSLETTVSTGKTNLSPAFSIKLFAKSTLSSSSKDKPTL

SEQ ID NO: 4403 - protein, 264 aa, Enterococcus faecalis
KTIFLKKEKDVLFMRKPIIAGNWKMNKTLSEAQSFAEAVKNAVPSNDVVDAVIGSPALFLAPLAWNLKDSEVKLAAQNCYWENAGAFTGENSPAAIADLGVDYVIIGHSERREYFHETDEDINKKAKAIFANGMTPIFCCGETLETYEAGKTAEWIEGQITKGLVGLSNEQVASMVIAYEPIWAIGTGKSADANIADEICGVVRSTVEKLYGKEVSEAVRIQYGGSVKPENIAEYMAKENVDGALVGGASLEADSFLALLDAVK

SEQ ID NO: 4404 - protein, 361 aa, Enterococcus faecalis
RVKAMTWGFRWYGSAGDAIPLKHIRQIPGITGVVGTLLNKLPGDVWTVAEIHALKQSVEQEGLALLGIESVAIHDAIKAGTDQRDHYIDNYRQTLRNLGKCGISLVCYSFKPIFGWAKTDLAYENEDGSLSLLFDQAVVENMQPEDMYQLIHSQSKGFRLPGWEEERLQQFQELKAMYAGVTEEDLVENLRYFLERVIPVCEEENIKMGIHPDDPPWEIFGLPRITKNLADLKRILSLVDSPANGITFCTGSLGADPTNDLPTMIREIGHRINFVHFRNVKYLGEHRFEETAHPSVAGSLDMAELMQALVDVGYEGVIRPDHGRAIWDEKAMPGYGLYDRAMGLTYIQGLYEATKAKQNRK

SEQ ID NO: 4405 - protein, 231 aa, Enterococcus faecalis
PIFKDCTKQPKPNKIGSDRMETKVEKNQLYQQLATCKLLPLYTATDLRYLPQVESVLVVNELPFIEVTFRSQLALPAIKQLAASGNLIVGAGTVRTLKEAQEPVANGAQFFDSPAIVPELIDFCLANDVPIFPVTATPAEIHRALAYGLRVVKFFPADIYGGLKAIKSLSGPFYDVQFLPTGGIDETNFIEYVEAKEVLAVGGSFILSEKMLQEDEASARQHVQSLLTKIK

SEQ ID NO: 4406 - protein, 161 aa, Enterococcus faecalis
KGEQRMLKNVEVFWQNFLDKHELDMLMPDVWMFGDGSSEMGNRLGQLVVSGRKTATCSSLDIYKMEEEQLPKAGQYDIILDGQSQPLAIIRTTKVEIMPMNKVSESFAQAEGEGDLTLDYWYEEHARFFKEELAPYQLQFYPDMLLVCQSFEVVDLYTEKE

SEQ ID NO: 4407 - protein, 77 aa, Enterococcus faecalis
QGVNVMKEEFSYEILEEVAVLSENARGWRKELNLISWNGRPPKFDLREWAPDHEKMGKGITLTNEEFAELSKTIKSM

SEQ ID NO: 4408 - protein, 240 aa, Enterococcus faecalis
AKQLNPCKRSTLSMKSMTGFGKKTIQNENYQLDIEVKSVNQRFLDIQLRMPKELNAYELVIRQVIKRTLKRGRVEVYVNLQKIGNNQKEVRVQWDLIDQLLTSVDQHLKEKYPEATFDAGDTVNHLLKQNDFVEIVEAEIVDQTFEPFLVQAFEAAIASLDQSRVQEGTQIKQVLLDYVAVLTQSIQELQAFVGVFEQEYRQRFEAKLNEWLGSQVDETRLLTELAIIWQKGANHGEVGA

SEQ ID NO: 4409 - protein, 245 aa, Enterococcus faecalis
EERSKGVTKMKQSKNKQVVIGEPTKKNIYLQDIEQETQAFILQNNPQLTAESMITLAELLNYRLDYMKQLVANDSEKIQQLNELVVQHIKEDKLISNNMNEKMEKKLTFGQRAADTIAKFGGSWVFIGFFCFVLIAWIVINSTTLLGQPFDKYPYILLNLALSCLAAIQAPIIMMSQNRQEARDREQANNDYKINLKAEVEINLLHEKMDYIINNQLENLVKIQNIQIELLGELQEQLAATSEKE

SEQ ID NO: 4410 - protein, 401 aa, Enterococcus faecalis
NMIELEEAREKMTQHMKSQCETEEVALLDSLGRISGETIFAETAIPHFPRAGMDGYAVRAVETRGATAESPSCLKVVGSLVAGDSMFYCNQTNNCAIKITTGAFIPTDFDAVVPQEWTDFGQDHVKIFRSVTAGQNYAEIGEDIAFQQKILAKHQQINSRMIGLLAMQGIDKVVVLKRMKVGILATGSELVSLEEPLSVGKIYNSNLYMLAAFVKASGNEVIHLDHCSDDPEELAKRLIEISPKLDVLITCGGVSVGEKDNLPLAIKRIGGTELFHFVNMKPGTPVMGSQFQETLILSVSGNPFAAMVNLHLFYWTLLATFFNCVELNLKERTVILAHELTPSRLRRFYRAKEIDGTVNLVTKSHLSSNLSNTLETNCLLEQPAGVLLKKGALVKVYYWQT

SEQ ID NO: 4411 - protein, 113 aa, Enterococcus faecalis
CRQAECFTHYNTRAMTGRTEGINQIANHSYIEINAVDAQALGIQEGNKVEVHSRRGKIETYAAVGNRVFPQEVFMTFHFPDGNVNEITNAVFDDIATIPEYKVCAVAIKPVNK

SEQ ID NO: 4412 - protein, 179 aa, Enterococcus faecalis
IKTECDYIMVESAKKFLRKVPIPICGLILGMVSLGNLLYSLGYATIGTIYCVLGSLLMILVILKIIFTMKHALSTLDDPIIASVSPTFTMALMVICVFLDRIFTNAAWINVLWIGAVILHFILMIYFVAVHIFPTKIELEHIYPSWFITFVGIGVIPNTSQLFINELGKIVFWVSLFFY

SEQ ID NO: 4413 - protein, 281 aa, Enterococcus faecalis
IERGDFMFEWIKTFIAVYETKNFSTAAKQLYISQPTVSLQIKKLEQHFSIKLFYRNGKQSVIPTKEADFLYPKMLSIIESLTTSFAQAAEKENFKEDCIIASSNTVAIYLLPDIMESLVTAFPLINFSIQLMNSNEVVDMVQNNHAHIGLIEKPIETKNLHKEIVYEDQLVLAGDAASKFWLLREKNSGLRFFNELYLNEHSINLPIIELNNNEVLLQLLKNNIGQSIVSRLSISDEIPWQPIDQSFASRKIFIVQTDHHANTSFSEVYNRIVEKIRERQT

SEQ ID NO: 4414 - protein, 71 aa, Enterococcus faecalis
RKLMNKKQENDLAKAKSFSCFLGLSFTNFFNDSVINFREGSIGMVIGLDNENFSRSKGLINWLPRDLIGNR

SEQ ID NO: 4415 - protein, 141 aa, Enterococcus faecalis
ERRIKMKQVKITTTSDLINGGCNACPNVKCTNYLVHVEDETIALETLTVADLVTLLALKEGFRQKLVMEMFEEYTVFERETHQVVFKEEETRILFQSKKQTIQSTLLCKEPQQVFQETQQILHQLFELEPFEFELVEETDE

SEQ ID NO: 4416 - protein, 123 aa, Enterococcus faecalis
GGKMTTTTVYYASNNEKQPNRFQLVIGSCSYELPKIEIYEILECVASAYGYQKEPFIEEQTECFVKGNRCIHVSQQATTLTFVVNDLRLVMEKQCRNHEEVFQEVNHILLNIFEETPCVFLEK

SEQ ID NO: 4417 - protein, 318 aa, Enterococcus faecalis
TMKVFNKKVAIIGTGFVGTSIAYSMINQGIANELILVDIDKAKSEGETIDLLDGVSWGQENVNVWAGDYQNCQNADIVVITAGANQKPGQSRLDLVSINAEIMKTIVNNIMKSGFDGILVIASNPVDVLTYVAWQASGLPVSTIIGTGTTLDTTRFRKELSQRLAIDPRNVHGYIIGEHGDSEVAVWSHTMIGTKPILEIVDTTERLTSDDLPIISDKVKNTAYEIIDRKQATYYGIGMSTARIVKAILNNEQAILPVSAYLDGQYGQQDVFTGIPAVVGNQGVTDIIELNLNAAEKELFQKSVTQLKQVMASLQPNA

SEQ ID NO: 4418 - protein, 70 aa, Enterococcus faecalis
FPFIVLFGTMKEELQLKQKLGGQKMVIQGDTLENSARRLLQERGVTMNDLAELVLFLHKDNSHNLSTTGK

SEQ ID NO: 4419 - protein, 151 aa, Enterococcus faecalis
FRLSLPTFYTVIFLKEVKLHDLFVSVIQSNYVHLLNLFIYKFISQFSNKKKTRREVEVAEEFFCYFLVPCVNEEKVIGETLKKLVALPIKKKIIAIDDGSTDQTKAMMDSIAGPIQVLSRQFPNAQQGKGAALNHAFQIVLTDAEKGHYSW

SEQ ID NO: 4420 - protein, 905 aa, Enterococcus faecalis
QASIVVTVFIENTAQKGSINIVQQDKESKQRLTGAEFQWKDTVTGKTGTVTVGTDGTVTIPNLAVNRTYELTETKAPTGYVLDKTVHKVTLTTAQANKVVTVIIENTAQKGSIKIVKQDKDSKKRLTGAEFQWKDTVTGKTGIVTVGTDGTITIPNLSVNRTYEITETKAPVGYVLDKTVHKVTLTTAQANKVVTVIIENTAQKGSLAIIKVDKDSRKRLAGAEFKWRDTVTGKEGTVVADKNGQALITDLPVNRVYEITEIKASNGYILNNKTYRVILTTNFADKIGYYTIENTAQEGSLAIIKVDKDSRKRLAGAEFKWRDTVTGKEGTVVADKNGQALITNLPVNRVYEITEIKAPNGYILNNKTYRVILTTNFADKIGYYTIENTAQKGSLAIIKVDKDSRKRLAGAEFKWRDTVTGKEGTVVADKNGQALITNLPVNRVYEITEIKAPNGYILNNKTYRVTLTTNFADKIGYYTIENVALRGNLKLIKQDGYSKQRLAGAQFRWRDTVNGNTGVVTANANGEATLYNFSVNRIYEITEIKAPNGYILDRTVHKILLPANYAGKTYTFTKNNQAQKGAIKIVKQDGYTKQRLAGAQFKFRDTTNNYTATFTANRNGEVLITGLAGDRIYEVTEIKAPNGYIIDRRVHKVDLRGQGGKTYTLVLNNQAQKGAIKIVKQDTDTRKRLAGAKFRFRDTTNNYTATFTANGNGEVLIPGLSSDRIYEITEIQAPTGYALDSRVHRIDLRGQGTKTYTLVLNNKANYGAIRIIKQDVETKARLAGAVFEWKDTTNGYTQRVTTGWDGTVTISGLSVNRVYEIREVQAPAGYSRNTTPTRVSLTQNHAGQTIAIVRENRKIPVYNPPPPTYWPGYIPPVTYYNPPVYYNPPKYYYRGCVMVIVVVCW

SEQ ID NO: 4421 - protein, 107 aa, Enterococcus faecalis
EEVRRIFMPVNKNGLPFYLDRKLDVIRFGVDPDNHVKEQQLFKYPVKTDKPNKKERFIEKESESLIQLGYKIVVDTVTGVNYLESPRGGITPLLDEIGKVCIDKISK

SEQ ID NO: 4422 - protein, 82 aa, Enterococcus faecalis
LCSFNNLKKVESLMNFGYLNFGTKDAVLVIAIFIILILTVLFRWSALEFVFSSGAVGIAFFAGNMKQDKRIADRENKKSEKK

SEQ ID NO: 4423 - protein, 75 aa, Enterococcus faecalis
QMVVRKTYDHWGIEISTWNKSNIVTFIDCDCGQLAKRELGKYNQFKCDSCNKEYKLYQGNYIPMDEKINEVAQND

SEQ ID NO: 4424 - protein, 123 aa, Enterococcus faecalis
KRKQEFLYLHSNESRNKQRKNSYLVRNNSGVVNIENREKIIQLLKNPLVTGYGIEIMSNGRLYSANFQRYKNRVKKEENPLIIFESMTEKVEQVFLELAEEVIRTNPKTKQEFKEMIKEYSYK

SEQ ID NO: 4425 - protein, 177 aa, Enterococcus faecalis
EEAWSRKKFHSEKYTGTNIRRKKRIRKSLLSIVKAGDKFLVTKIDRLARSIVDLNSIISALNHKGVTISFLDDHLTFEPDKKDSMQTLMMNMLGSFAQFERDLIVTRTQEGKQWHRANNKNYREGRPKRVLNDKYKHALELMETNSMREVEKKTGISLSTLKRIKKQAKEEQLLSEK

SEQ ID NO: 4426 - protein, 187 aa, Enterococcus faecalis
FFFPTMQKNIRAAQVESLVAGPIKSEKVSVLDYKTADKKIQETGAMSVMFAKPSGKQYDQMVKLFNSDKMNEFHRSLYIYPLIYNAGKAQEQYNVSGDEITLVFFENGKEKTRTVVEKSMDLKTQLIPELNRLPMAGVLKDQQKAAQEAEKEAAKTAETQTTTSTTGVAQSTETTTESTDTVPETGE

SEQ ID NO: 4427 - protein, 268 aa, Enterococcus faecalis
WSNVTMIDLKKNYQIMGIVNKTPDFFSDGGRYTTVDVAYQHALNLLEAGADILDIGGQSTRPGYEEVSPQVEADRVLPLIKKIRETSLAPISVDTYYPEVAEAAIQAGATMINDIKGLDTPGMAEVLAQYPEVQVVIMHSRKRQSLSLKEELHQFYTEKIEQCQKYGLSLEKICFDPGIGFHKTVAENLQLLKDPNAFRYQDYPLLYGVSRKRTIGALTNEPEPANRDFGSAAASLYAAQQGVEILRVHNVQGLKQTFDVWRALSEKE

SEQ ID NO: 4428 - protein, 198 aa, Enterococcus faecalis
KMEIIVGTNNQGKLKEMQSGLKDPAIRLVSYRKYTTSQEQPAETGTTYAENAYLKARFFQQLIGRPVLGDDGGLTLTAFPDLLGIHTSRFFHSANPEEQNRELLHLFEGQQSTRELTLSATLVYVLNDDKLLQTEATLTGELVEPRGTGGYGFDPIIYLPDRGKTLAELSTSERMKIIPRIRALRKMIQQIMEQCDND

SEQ ID NO: 4429 - protein, 193 aa, Enterococcus faecalis
  MISC_FEATURE (11)..(11): Amino acid 11 is Xaa wherein Xaa = any amino acid.
AKREWVEMEQXKQAQIEQAVTTILEAVGEDTQRAGLIDTPKRVAKMYAEVFSGLTEPEFDDYKLFDSLNEGEMVLVKDIAFYSMCEHHLLPFYGKVHVAYLPEGGKVLGLSKLPRLVEHCAKRPTVQEDLTVTIARKLQENIPVKGIAVAIEAEHMCMTMRGVKTPQSSTKTFQFTGLFKEQEWKNQFLMEIR

SEQ ID NO: 4430 - protein, 172 aa, Enterococcus faecalis
  MISC_FEATURE (168)..(168): Amino acid 168 is Xaa wherein Xaa = any amino acid.
MIGYVALGSNVGDPYANLVKARNYLNEDPQIQVVASSKLYETDPYGYTDQDDFLNAVLKIDTSYTAEELLAVTQGIEQAMKRKKLIHWGPRIIDIDILLLGGQSVTLPHLQVPHQELTKRSFVLIPLSDVYAEEQLLGAPIATWIQRSGNQEEVRVSEKGMGRDGAGXTSAN

SEQ ID NO: 4431 - protein, 121 aa, Enterococcus faecalis
RMDKIRINNLKFFTKNGVLAEEKRLGQQVEIDLEMQLSLAEAGRTDDVTQTVNYAEVNELIAQRVNNHSYDLIEGLASAILDDISADYQEQLNKIIIKIRKYSVPMPGLFDNIEIEMEREV

SEQ ID NO: 4432 - protein, 86 aa, Enterococcus faecalis
RPSENLSSLALHPMYFALGEYRQKCDMKLMCVGKEEKIVGLHGIGIGVDEMLQGFAVAIKMGATKADFDNTVAIHPTGSEEFVTMR

SEQ ID NO: 4433 - protein, 353 aa, Enterococcus faecalis
SAPGMHGANVLLIEGNEIGGTCVNVGCVPKKVMWQASSMMEMMERDTAGYGFDVEIKNFSFKQLVENREKYIDFLHGAYNRGLDSNNIERIHGYATFTGEQTIEVNGTEYTAPHILIATGGRPKKLGIPGEEYALDSNGFFALEEMPKRVVFVGAGYIAAELAGTLHGLGAETHWAFRHERPLRSFDDMLSEKVVERYQEMGMQIHPNATPAKIEKTAQNEYVITFENGESITTDAVIFGTGRQPNTDQLGLENTKVALDEKGYVKVDKFQNTTQNGIYAVGDVIGKIDLTPVAIAAGRRLSERLFNGQTDLYLDYNLVPTVVFTHPPVATIGLTEKAALEEYGEDQVKIYRL

SEQ ID NO: 4434 - protein, 155 aa, Enterococcus faecalis
VYFYHKIYHRFAVLFTYLRLLKMTKQLFNAYCMIFLFLKLLWNFRWGVANIRRKLTIYSGFILLESLVSFSIVCVIAGIFSLTITQLIQQNYQREQELTRTRLGYEAILFLEQTGDLRFKERIYQGETYRFSLMENDGRRILKVTDSRGAILIGQ

SEQ ID NO: 4435 - protein, 144 aa, Enterococcus faecalis
LVNKKYAGFTMLECLVALVVLSCMCQLFQLMIQQSFIGNQYLKNNDSKSWHIFLIQLEKECQKLVFQTGSAQEISFLDSETNKTISIQIKEDKIIKRVNGKGYQPLLIGIKNGQFKNEGQSFTLEVTFTSGKTFDSFFPIKGEF

SEQ ID NO: 4436 - protein, 351 aa, Enterococcus faecalis
  MISC_FEATURE (19)..(19): Amino acid 19 is Xaa wherein Xaa = any amino acid.
NRYGSCYILNRIDVLICSXKEIEEAFEPMEQAIQLLQQSLDTSFLDAYIENGENILDDFQVRVLDGVPNPETVKQLETLYHTIKKIDLAPEDVRRLSQLLLLKGTRKEQLQANHQLTPDGIGFLFVYLVEQLTNKSEPLKILDPASGMGNLLLTVLLNLETAGYKVSGYGVDIDETLLAVSSVNNAWSQANIQLFHQDGLQDLLLDPVDLALSDLPIGYYPNDERAKGFAAAAEEGHSYAHHLLMEQAMKYVKPAGFGLFLIPTNILETEQSEFFKNWLTKNVYLQGMIQLPDELFKSEQSRKSILLVQNKGADAEQVKEVLLAKLASLKDINKVTEFFKQFEAWKASNLK

SEQ ID NO: 4437 - protein, 277 aa, Enterococcus faecalis
NSNEEEKIMSKTIAINAGSSSLKWQLYQMPNEEVIAKGIVERIGLKDSIFTIKYGEGQKYEVIVDIDNHEVAVKMLLDQLIDLNILGSYDEITGVGHRVVAGGEEFKDSVVITDEVLEKIEALSELAPLHNPANAMGIKAFKHILPEIISVAVFDTSFHTTMPEHNYLYSVPREYYEKFAARKYGAHGTSHRYVSQRAAEMLGRPIEDLKIITCHLGNGASITAVDGGKSVDTSMGFTPLAGVTMGTRSGDVDASLLPYLMTKLGLTDVQDMVDILN

SEQ ID NO: 4438 - protein, 257 aa, Enterococcus faecalis
IATFNETLYKKVRGNDIGMIFQDPLSALNPLMRIEDQIKESLTYHTKMTAQQKQARAIELLDQVGIPNPERVGKQYPHELSGGMRQRVIIAIAIACKPPILIADEPTTALDVTIQAQILDLLKDLQEETGSGIILITHDLGVVAEMADRVAVMYAGQFVEVATAEELFSHPKHPYTRSLLQSIPQENSDEEELHVIEGIVPSLTKLPRKGCRFAPRIPWIDASEHEENPTLHEVAPNHYVRCTCYKHFHFRDGEGEA

SEQ ID NO: 4439 - protein, 321 aa, Enterococcus faecalis
RRGRGSVMTEIIQIKDLKVHYPIRSGFFNRITDHVLAVDGVDFMIEQGKTYGLVGESGSGKSTTGKAIIGLEKITNGEIIYQGQDVTKPRSRKAIGYNKDVQMIFQDSMSSLNPKKRVLYIIAEPIRNFERLSDQEEKKKVKSLLDIVGMPEDALYKYPHEFSGGQRQRLGVARAVATSPKLIIADEPVSALDLSVQAQVLNFMKNIQQEYGLSYLFISHDLGVVKHMCDNIAIMYKGRFVEIGTRQDIYTNPQHIYTKRLLSAIPKIDVANREAHKEERRRVEQEYRENHKDYYDENGRVYNLHAISPTHQVALKNGGAE

SEQ ID NO: 4440 - protein, 321 aa, Enterococcus faecalis
IMWKTILRRLLLMIPQVIILSVLIFLLAKMMPGDPFTGLINPNQDPKVIEAMREAAGLNDPWYEQYFRWIGNALHGDFGHSFIFKLPVSTLIAGRVGNTIALAAVSVIITYLIAIPFGLIAGRYQNSWFDKMVVIYNFFSFAVPLFIFALIMLFIFGYRLDWFPTSGTVTVGLAEGTWPYYLDKLKHLILPGVTQALLGTAVTIQYLRSEVIDVKNMDFVRTARSKGVPTNKIFNRHIFRNAALPIASQLGYEITALIAGSVVIEKIFAFPGIGKLFIDSIIQRDYSVITALVLILGLATLIGTLISDIVMSIVDPRIRIQ

SEQ ID NO: 4441 - protein, 316 aa, Enterococcus faecalis
KKHEERVIKMELTEEKREEVLQESIPPMGFRMIAREFVKEKMAMFSLILLVIILLAVFIGSLVLDQSAVMHVSILDKYAEPGTVTMNGTKFILGADEGGRDVLGQLIIGARNSILIGFAITIITSIIGVGLGIISGYYGGMIDNILMRIVDFIMILPIMLIIIVFVSVIPKYSIWSFIWIMCAFYWVGKARLFRSKTLSEGRRDYVSASKTMGTSDFKIMFREIMPNLSSLIITNLTINFAANIGIETTLTFLGFGLPQSVPSLGTLIGYASSGDVLVNKQWVWLPASILILVLMLSINYVGQAFKRSADARQRLG

SEQ ID NO: 4442 - protein, 316 aa, Enterococcus faecalis
GKLSINARGQGAFTLNEWIEQWLVIVKKEVKLSTFASYSYKLSNYVLKTMGDSALNEIDDLRLNKLVEDLIAQGLSKSTICVIFGILSRALNHAVKAKHLKSNPCSTISLPKPKRRHIRALDIEEQKKLENVAYKNPQQQGLSVIVALHTGLRIGELAALRWEDINFKKDTIHVKHTFQRVSVSSFGESTQLYYDCTKTINSERIIPMSNTVKNALKCQKEHSQGKFVFSRNNKPCEPRLLTYYFHKLRDKVQLDKVHFHQLRHTFATRCLESTSDIVSVSALLGHSSTQMTLDIYADSLLEQRIKAIKRMERTIA

SEQ ID NO: 4443 - protein, 229 aa, Enterococcus faecalis
NKEERKEMKKNLVVGFVSSVALVGIAIAGGGNVQATVTDSASTDIGIGFSGHGPGTTPGPLDIQWAPIGLDFSNSNMVNTTAVQAFPETTGTNKYVVVSEKRSNEPTREWSLTAQLSDLTNAGGSETLTGAGLKFDAAVKGYTGTNTPESPGSIVDKGARTATVNASSQSVTAGAAAVPVMKDAGTGGASFLGSTAMEMSNVKLEVPANAAKINQQYSGTLTWSLNDTI

SEQ ID NO: 4444 - protein, 349 aa, Enterococcus faecalis
VKQREKFFMGFIAFLLLSIFFPSVVQAENTSTEEKMGFTVGSIIPDNQVDTTKTYFYLAMKPNQKQSIQVKLKSLQDTPLTIQVGIHTAVSSSVGAIDYTNVHPKFDASMKDPISELVKIKDGVKEIPLKGKEEKTITFEITTPESAFSGVKLGSLRFVRKNSTEVKQKKSGLTPQYARVIAIMLTEDEEPFNQGAMLHLKKASLQLANGQKVIAARIQNDQPKVLQELTIQGEIRLKGEKKILYKHKMEKFSVAPNSNFDFNIPIGLNTFKPGTYHFTGKATGDGRTWKWEKEFKVGEAQAKKVNQSAAYQVVIPQWVPWVALSLTVALAGLIAYLVRRGEKWKNEGK

SEQ ID NO: 4445 - protein, 123 aa, Enterococcus faecalis
FVVERSGKTKGSDIMRRRNLQFLLLLVLLIYIPQTTYAENRETTEVGIGFTKTSDIPSKKNPVVNVLPQTTIQSLSIVRSRTQIKRLPKTGDNRITWLSWFGILFLISSFWLFLFRQLCRKGE

SEQ ID NO: 4446 - protein, 62 aa, Enterococcus faecalis
TQKQSKGFTHSYSPFLHNCLNRNSQKLLIKNNMPNQLSQVIRLSPVLGNLFICVLLRTIDSD

SEQ ID NO: 4447 - protein, 64 aa, Enterococcus faecalis
SVFASIEESVPESKLEDDVDSTFLDEVVFADTITPIIPCERTKPKHKNNLKDLLIVILLFYIIV

SEQ ID NO: 4448 - protein, 194 aa, Enterococcus faecalis
KRRITMSKSFRLFLCLGLVLSQGIMGVMVSAKTTSSKKVESTSSSSLLSGTDSSIDANTDQSQGTKNSMELTTTSTLNSTLSTKTTPTQENESAKLDKKNKELDPKTTNLIEGTDIDARFATLLRTDSTVQSQGNNWSGFGKDKDQLTIADMSSLTKITVTNKNLDSLKGIKYAEQLTDLSCQFNNLTNLDFSQ

SEQ ID NO: 4449 - protein, 256 aa, Enterococcus faecalis
PVVNALVGGMTSKDILMGSFGKEADPSSHGRQMPNHYGSKEHNIVSFSSTVSTQMPLATGVGYAAQLQKADFVALTTTGEGSANQGEVQEAMNFAGVKKLPVIFVVENNEYAISVPIEEQYANKRMADRAKAYGFEGVTVDGSDFTEVYLAFKEAVKAARGKKGPKLIELMVSRLTSHSADDDQSVYRSKEEIEEMKKNDAVKLFEKQLLEEGYLTDEDIAKIDEEIRAEINQATDEAEAMPDPVPTSILEEVYAK

SEQ ID NO: 4450 - protein, 335 aa, Enterococcus faecalis
EKRRRNIMAEMTYLEAINLGISEEMARDEKVVIFGEDVGGDKGGVFGVTKGLAAKYGDERCFNTPLTEGLIGGLAVGLGLMGYRAIGEFQFADYILPATNQLLSEARTMRYRTKGDWTAPIVYRTPYGGGVRGGLYHSQSTEKVFCGQPGLRVVTPSNPYDAKGMIKAAIRSDDPVIFYEHKRLYRLLKDEVPADDYIVPIDKANVVRTGSDLTVISYGMTLQLALAAAEKLAAEGIDAEIVDVRSLYPLDRETLVAAAKKTGKVLLVTEDNKEGSVMSEIAAMISEDALFDLDAPIQRLAGPDCPSMPYALPLEREFLINEEQVLAAMKELAEF

SEQ ID NO: 4451 - protein, 87 aa, Enterococcus faecalis
MATKEIKMPHLGESVTEAAIVQWLVKPGDSVKRYDPLMEVVSDKVTTEVPSDFDGVVKEFLISLDTDVPIGTAVMTLETKKPRKTPK

SEQ ID NO: 4452 - protein, 378 aa, Enterococcus faecalis
WCSKRISDFSRYRCAHRNSGDDFGDEETPEDTEVATLAPVKEASAEQAQEHETAETTSIATFHQKNNVRYSPAVLKIAQEKKIDLTQVTGTGRDGRITRKDVTNFTPTQARTPEKTVSPGTSPSISEEPVASQNESAATASPTETSTDKIVSADPVRKAIAKKMVQSVNEIPHAWLMVEADVTNLVQLRNSLKDEFKQQEGLSLSFFPFFAKAVIQALKKNPKINTSWDDGSIIYHKDVNLSIAVTTDEHLYVPVIQQADNYSIAGLAKEINRLAQEVRQGTLASKEMQGGTFTLNNTGTLGSVQSMGIINHPQAAILQVESINKRLVPTADGGFKVADMVNLCLSIDHRILDGQQAGKFLRDVKDNLAKYNADTDIY

SEQ ID NO: 4453 - protein, 162 aa, Enterococcus faecalis
SIGVLKMPTDKLDAQLTPRIFFNKVLAGTASGTIIALIPNAVLGAILKYFAEYKIIEMIIHAAQIFQLATPLIIGGLIAFQFGLTPQKMMIAGGAAFAGSGVIKFNSQVKGFIGAGTGDIINIMITASVAVLLLLVIDKKFGSVEIIALPIVVGVRAGLFGM

SEQ ID NO: 4454 - protein, 274 aa, Enterococcus faecalis
FFMNYTNSRTFNPEILYAFDPWNEETHPYNCHHHEFLEISILLEGESEYIVQGQQYHATAGTVFLFNPRTEHGEQQKAGTYSHQLHIGISNLYLEGLARNVFPNKSALLDLSHLHGAFLEKAWQIVHELNHQEVESALQIKALVIELLVYILRSLAVDQENKIETRLSKTEKRKRNLVNHTIYYLETHHDEEITLEQLAEMLYVTPTYLSKTFKAATGVGPINYLIQIRLNHAKELLKNDSLSVKEVAKTVGYEDAYHFSKLFKKYYGKSPSQF

SEQ ID NO: 4455 - protein, 60 aa, Enterococcus faecalis
NFRIKRSTICVVHKKSLLLVSAFYTILYIKIYKNAHFFSYKKTVILYTSIKTRESRGENE

SEQ ID NO: 4456 - protein, 590 aa, Enterococcus faecalis
  MISC_FEATURE (406)..(406): Amino acid 406 is Xaa wherein Xaa = any amino acid.
KQERVGEKMNSFEWIWQYAKKNKNKLLLAVIFVVINAILIVIIPLLSGRIVDQVINQGKTEELVPILGIMIGVTVIRTVVRYSYQVLFESVGQSALFDLRKDMYVKLQELDFDFFNHTRVGDIMARMTGDTDAIRHFVSWVTYNLLECILWFIAAVIVMGTINWQLMLALILITPLIFLLTQKMSKESHPVFFEIRESFSRLNSMVEENIGGNRVVKAFSQEPYEIEKFNKHNEDYKKWNMASADVSKKYLPWLDGFAGSLNVIALVLGGLFVIQGRMTIGDLVAFNGFLWMLNMPMRMSGWLINDVQRFTASSIKIRQLLATKPKIPIAREKEAEPIQGYVTFDHVSFHFSDDPETPILSDVSFSAKPGETIGILGETGSGKTTLVNLIARFYDPTKGTVYIDGXDAKSYSVRKLQKNFSMVMQDVFLFSNTIEDNIAFGNTLANLEQVQMMAEIADAHSFISRMPEGYATIVGERGVGLSGGQKQRISLARALTKDPAILIIDDTTSAVDMETESKIQKELGRLTEKKTTFIIAHRISSVREANLILMMEKGRVVESGTHSELVEQKGKYFDVYQKQLGLTKEGESRG

SEQ ID NO: 4457 - protein, 575 aa, Enterococcus faecalis
QRKVSRVARNTFDVDETLEKEFNWSHYKRLGAYIKPYKKAVFKTLFVIILANLASMLGPYFTKIAIDQVIPQKNLSLLLILGAIFLFSLVIIGWCMRYRIYAITEIGQDILKDMRFSIFEHLQKLPFSYFDSRPHGKILIRVVNYINTLSDLLSNGLINLISDLFNVIITLIFMLFIDVKLTLYSLLLLPVLFVMVLFIQGKQRKAYQELSNKQSNLNAYIHESISGIKITQSFAREDENFQIFNEVSEEYRQSFMKAVRVQYLLWPAVQNISVITTCFIYFVGIRQLGVSVTTGTLIAFIGYINNFWNPVINIGNFYNSLITATAYLERIFETMDVVPEIQDAPHAIELPPIKGTVDFQHVYFRYEEGKNILTDVSFHIEPGQTIALVGPTGAGKTTIINLLSRFYDVNEGAVKIDGYDVRDVTLRSLRKQMGVMLQDTFIFSGTIIENIRYGNLAATEEEVIQAAKIVRAHDFIKDLKDGYETVVEERGSTLSAGQRQLISFARALLADPKILILDEATSSIDTKTEELLQERIPQLLKRPTSFIIAPRLSYHQNSDKNFYIDGGPYGGKKDP

SEQ ID NO: 4458 - protein, 291 aa, Enterococcus faecalis
NANDYLLLFLTKTLKTIGGVKMVQRLISANASEIKRMSKEELFQSIKASEGRVILSENVVVHPSVAGDITCAEMSKAYGADMILLNVFDVNQPIVVAAYEGQYTAETCVPNDEVVHRLKELVGLPIGMNVEPVDENLDLASTRVSIEPGRKASAATFKKANELGLDFILLTGNPGTGVTNDLIAKNVALAKKHFDGIIIAGKMHSSGVDEPVVSLKSAEQFIEAGADIVLVPAVGTVWGIDDQQVKEVVDFAHSKGKLVMSAIGTSQESAQPEVIQAIGIRNKILAARYST

SEQ ID NO: 4459 - protein, 303 aa, Enterococcus faecalis
MSFASDVKKELTGLEVHREHAKAELAALIRMNGSLSLVNQQFVLNVQTENAAIARRMYSLLKDHYHAQAELLVRKKMKLKKNNVYIVRLKQDTQKILADLDIMDGVVFNGNVSNEIMGNAQKMRSYLRGAFMASGSVNNPETSRYHLKIFSIYEEHNNDICKMLNYYDLNARTLGRRNGYICYLKGAEKIADFLTLIGATNSMLKFEDVRIVRDMRNSVNRLVNCETANLNKTIDAASKQIENIQFIESTVGLTSLPEKLQEIAELRLEYPEVSLKELGEMIPSGAISKSGINHRIRKINEFA

SEQ ID NO: 4460 - protein, 312 aa, Enterococcus faecalis
SIPVAVTLKNQSVDITAVVTVADDGGSSGELRSSINNMTPPGDLRNVLVALSDMPQLYEDIFQYRFDKSDSHFANHAIGNLIIAAVSEMRGSTYEAIQLLSKMMHVDGRIYPSSERPLTLHAVFKDGSVAVGESKIALDRKTIDHVFVTNTHGEEQPRAARKVVKAIEEADMVVLGPGSLFTSILPNLVITEIGEAIKQTAAEVVYICNIMTQKGETEHFTDADHVRVLNEHLQAQFVDTVLVNTEKVPENYMDPEIYDEYLVQVKHDFQGLREEGCRVISTDFLELRDGGVFHDGEKVVEELFRIVFGTKY

SEQ ID NO: 4461 - protein, 334 aa, Enterococcus faecalis
QKLRKCSEQLSFIERLGYNESSKGRNLMFGLLKYAKNYRKQIILGPVFKFLEACFELVLPLFMAHLVDVGIRQNDRQTVIEMALWMLVMSLVGLFFVMICQYYASVASQGFGTELRNQLMKKINQLSHKELNSFGTDTLITRITNDINQLQLALAMFIRLVIRTPFLSIGSVVMAFYIDVQMGFLFLLLLPIFSLILFIIIKVTVPLYQKVQEYLDRLNRQISQNLSGVRVIRAFAKKETEQRHVDKASDDLGDIYIRVSNVSALLTPLTTLIMNVGILFLLYFSGLKVSFGSLQQGEVLALINYMNQMMLALIVASNLVVIFTRAAASGKPCQ

SEQ ID NO: 4462 - protein, 281 aa, Enterococcus faecalis
FLRELPLPANRVNEVLTVESQLTDTPESAKTSPQFGDITFDHVDFRYEPEAGLALENINFTIPKGSILGITGPTGSGKSTLTQLIPRFYDVSAGNLFINGVNVRDWPLFTLRQQVASVPQTAVLFTGTIRENLQWGKPNATDEDCWEALAIAQCKEFVEQLDQGLDTPVNEGGKNFSGGQRQRLTIARALIRKPHLLILDDSLSALDYQTDLNLRRALQKERAETTVILISQRVSSIATANQILVLDSGKVAGLGTHEELLTSSKEYQEIVASQEEDTHAN

SEQ ID NO: 4463 - protein, 620 aa, Enterococcus faecalis
IVEKSLALAPTKNYLLLLKSIKKSLRHRRRIPMQTKKIHFGAFSRFKPYLLRYPKEIIGALILGILSGFSTVLMTYYIGKSVDTMVGKGQVNAAQLIKILGLLAGILLVTVLSQWLIQRLGNRVSYLSTTQLRKDAFAHLNQLPLSYYDQTSHGNIVSRFTNDIDNISMACSAVFNQLFSGMATVVVALLFMIRLSPLLTLVVLISTPIIFIVNWLVAKASQKNFAAQQTIVGEISGFVSEMVGNQKIVKAFQQEQATQETFEALNQTLYEKGQKAQFSSSLTNPLSRFIDHLSYLSIGLVGGLLVLSGNPLVTVGVISSFTIYSSQFSKPFIELSGITNQIQAALAGLERTFDMMDQPVERPDASNAIVLKEARGRVEFKDVDFSYTPTRPLIENFNLIAEPGETIAIVGRTGAGKSTLVNLLMRFYEVDRGQITVDTHDITQITRDSLRKSFGMVLQDTWLFDSSIRENLTYGNPEASDEEIIEAMKKAHIFDFVMRLPQGLDTEIGSQGVKISEGQRQLMTIARTMISNPPMLILDEATSSVDTLTEQKIQDAFLQMMTGRTSFVIAHRLATIKSAEKILVMDNGQVVEIGTHDELLQKEQGYYRDLYEAQFNQKAQ

SEQ ID NO: 4464 - protein, 178 aa, Enterococcus faecalis
QMKKFGTKSIALMGVLIAVVVVFSRFFAYETTFLKISFTFIPESLIGMIFGPFWAGIGTAVADVVGMLLFPKAGYFPGFTLNAFLAGAIYGYFYYKKEMTWQRVILATLLVTVLINIILTPLWLSLMYGVNLANFAWWVPRLIKTVIFFPIQVIATYYLGNKIPFKRLFGKPLSELDQ

SEQ ID NO: 4465 - protein, 62 aa, Enterococcus faecalis
  MISC_FEATURE (62)..(62): Amino acid 62 is Xaa wherein Xaa = any amino acid.
NNRVGDKALSAKRMGCCLLDEEHKQCVATKQRFLLCLSSEQHVQLFNVRGFVFAFAAWFVLX

SEQ ID NO: 4466 - protein, 120 aa, Enterococcus faecalis
RLKLILEKHELYATGTTGMKVMEATGLPVHCFKSGPLGGDQQIGAMISEDNIDLVIFLRDPLSAQPHEPDVTALIRLSDVYEIPLATNIGSAEILLRGVEAGFADFREVIHEGDRRPLAF

SEQ ID NO: 4467 - protein, 181 aa, Enterococcus faecalis
VENMYRSPYEAYPYLSSKPEDLRCDFELMTDELASMTGLLRGYVQQLDVPEQPALTEELAKICELIYHVNPTTRTKLTVTEDEIAWLLERVNAMNELTYEENRPFVLPMGTICSSYAHILRAKAKDIVRLLYRMDYGGKKIDPQLYDVVNLLSGYFFMLALYLNQLENGEEVPFVSRNYSI

SEQ ID NO: 4468 - protein, 282 aa, Enterococcus faecalis
QLRICVARNTFIKKYKERIKMSYPYYIVDAFAEEVFKGNPAAVYVLEKWLPEAVMQNIAIENNLSETAFTVKEGQSYALRWFTPEREIDLCGHATLATAFVLFNYYSVAEETLHFTSQSGPLAVTKKEEYYYLDFPYILPERIPILPEYEAALGTKIYEAYLGRDLFFVLKDEETVAKITPDFSALKALDLGVGVIVTASGDSVDFVSRTFFPKLRINEDPVCGSAHANLIPYWGKRLNQTTLSAYQVSPRGGFLTCEVKENRVIIGGTAKLFAKGEAYLPV

SEQ ID NO: 4469 - protein, 346 aa, Enterococcus faecalis
NCIPYNYSIECIVCLVYDSAKGGIQMDIISYERVIQQLSFSEAIQVMKRCFAELQKGKISQSERHVEVLPDGKNQNLFALMPAYLGKNRFFGAKIITAFPENPQKNLASHLGQILLFDSSTGRPVAMMDANAITWLRTAAVSALATDYLAAPKAKSIALIGAGQQASSHLAALQSVRAIEKVFIYDRTAERARKLIAKQQHNYPECTFIGCSSVQEAVQEAEIICTLTSSQDAFLEEKDVLPNAHINAIGTFTPTSRELTSDLVKNSQVFVDEYAAALKESGDLLIPISEGAFSAEKIVGSLGELVTGKVKLKAEQKGRTIFDAVGLAVEDLCCAEYIYQKIQGEN

SEQ ID NO: 4470 - protein, 396 aa, Enterococcus faecalis
  MISC_FEATURE (396)..(396): Amino acid 396 is Xaa wherein Xaa = any amino acid.
LYGIQFYRKEVPLMPINSYENYVLSWRPVKERLTRPYYQSLVQQLEADILSGALQKNVKLPSQRELADYLDLNFTTIGQAYKHAMEKGLLYTNIGSGTFVSPNAFHSITISTNQVADHLIDLGLVSSFDMCNQRILPFIESVSKNAALNSLLNYRDPLGTHFQRATAAEWLQTQGVRTNAEEVAIVSGVQNGLAVTLAAAFSPGQRIAVDRYTYSNFIELAQLYHLEIVPIGYDSEGMDPEHLLQECKKKKIHGIFLMPACNNPIGFQMSSARRMTLAEIIQQEHLWVIEDDIHSFLTTYAQQAVLPTFQELLPQQTIYLAGMTKFVCTGLRIAYLVFPPLVRQEIERAIFNINVKTSGFDAEIVTQVLRSPVAKELVIEKLDFTIQGPDLFVSIX

SEQ ID NO: 4471 - protein, 446 aa, Enterococcus faecalis
CKVNDGREKEMKHVTKLGITIITGVLALLFEFILHQPNWAYGIILITGSVMALMMFWEMIQTLREGKYGVDILAITAIVATLAVGEYWASLMILIMLTGGDSLEDYAAGKANQELKSLLDNSPQKAHRLNGENLEDVSVEEINVGDELVVKPGELVPVDGLVKTGTSTVDDSSLTGESNPIEKIPGDELMSVSVNGDGSWKMVAEKTVADSQYQTIVNLVKESAARPAHFVRLADRYAVPFTLVAYLIAGVAWFVSKSPTRFAEVLVVASPCPLILSAPIALVAGMGRSSRHGVVIKSGTMVEKLASAKTIAFDKTGTITQGQLSVDQVQPINAGITAAELVGLAASVEQESSHILARSIVAYARKQDVPLKNITDLAEVSGAGVKAFVDGAEIRVGKKNFVTQESQETEKIDKTTIHISRNGTYLGRITFTDTVRPEATASSPRF

SEQ ID NO: 4472 - protein, 279 aa, Enterococcus faecalis
GGLEMTTLQEKIIQELGVLPTIDPKEEVRKSIDFLKAYLTKHPFLKTFVLGISGGQDSTLAGRLAQLAMTEMREETGDMSYQFIAIRLPYGEQADEADAQAALAFIQPDVSLRVDIKPAVDAMVGSLENAGVQISDFNKGNMKARQRMITQYAVAGENAGAVIGTDHAAENVTAFFTKYGDGGADILPLFRLNKRQGKALLKELGAPEALYLKIPTADLEDDKPLVADEVALGVTYDAIDDYLEGKKVSETDQQTIENWYKKGQHKRHLPITIFDDFWK

SEQ ID NO: 4473 - protein, 102 aa, Enterococcus faecalis
KFICSIPFIPLLISMSVILKHGQYSQDIFVEGKRVYELPTLDEIKQYAKENLDSLWEEYKRDLNPQKYPVDLSTDCWNHKMNLLEKVRKDVKHLTETVNKEA

SEQ ID NO: 4474 - protein, 424 aa, Enterococcus faecalis
KTMDYTYADDSLTLHTDMYQINMMQTYWELGRADLHAVFECYFREMPFNHGYAIFAGLERLVNYLENLTFTESDIAYLREVEEYPEDFLTYLANFEFKCTVRSALEGDLVFNNEPLIQIEGPLAQCQLVETALLNMVNFQTLIATKAARIKSVIGDDPLLEFGTRRAQELDAAIWGTRAAYIGGADATSNVRAGKIFGIPVSGTHAHSLVQSYGNDYEAFMAYAKTHRDCVFLVDTYDTLKAGVPSAIRVAREMGDKINFLGVRIDSGDMAYISKRVREQLDEAGFTEAKIYASNDLDENTILNLKMQKSKIDVWGVGTKLITAYDQPALGAVFKLVSIEGEDGQMKDTIKLSSNAEKVTTPGKKQVWRITRKSDKKSEGDYVTLWNEDPRQEVEIYMFHPVHTFINKYVRDFEARPVLPRYFR

SEQ ID NO: 4475 - protein, 126 aa, Enterococcus faecalis
TLGEEFGGGATTVVNLVVFFVCQNVLGLDYKISNAISWFLSVLFAFFTNKYWVFASKHESIAGFFKEMGLFYWYRILSFVADMGLMILLIDGIHFSSFWAKMITQVVVVILNYFFSKFFIFKEKEV

SEQ ID NO: 4476 - protein, 252 aa, Enterococcus faecalis
SPESRGVKRLINKNALRKFDIFNSSIEVPYIEKASADVLKVEEITYENILKDINFDVKVGDVIGLVGKNGVGKTTLLRILMKIIRPTKGKIIENKKNLSSPFLVMQEMDYQFFTESVRSELALGNEIVSKDQQEKILKKMELYKMKDQLPFDLSGGEKQRLLVSIASLSKTNLFLFDEPTSGLDYINMERIADLIKDLKERGAVVIATHDPEFLYKTCNRIIYLKNGGIKKDIKLRVEDSTLIEQIFNDITN

SEQ ID NO: 4477 - protein, 60 aa, Enterococcus faecalis
KYSFFGRSSFKINIKPNCGFQDYYPQISVGDYVGEQNRPHPIVLFHLWKKSKFSRENNCS

SEQ ID NO: 4478 - protein, 64 aa, Enterococcus faecalis
KIPFQFFSKKGKMDTTNVSVSMPIYFKVQRYLLSMKNVKERLGTPNENQLFRHGCSRTDSRNFL

SEQ ID NO: 4479 - protein, 279 aa, Enterococcus faecalis
VLPMKINYLGTGAAERIPGIFCNCKLCKYAREKKGREIRTQTQLIIDDVLLIDFPGDSYLHLLQYDLCFADFDSLLISHWHSDHFYGEDLAYRMSGYALDIPNRLTVYGNEAVKTFYQRAFDLEGRQDDTRLHYQVIQPYKCFTIANYTIYPLPAQHGNFSEDCFIFVIDDGKDAFLSTHDTGYFTSEMFEYLEKSHLLLSIVSLDCTSQTNETGNSHMNWEENLKLIAELKERKLVTDKTIYVANHFSHNGGLSYAEMAALSQKHEIITSYDGLEILT

SEQ ID NO: 4480 - protein, 67 aa, Enterococcus faecalis
LLHFHKQLNDWEYLMHNQTFDKPNPRRKNDRNANERLVKSQSLQNTSRTATGVNKNPLENQSAGHHQ

SEQ ID NO: 4481 - protein, 294 aa, Enterococcus faecalis
IKMDKEWHNLMKKFSIRKISAGFLFLILVTLIAGFSLSANAEEYIVPAESHSRQKRSLLDPEDRRQEVADTTEAPFASIGRIISPASKPGYISLGTGFVVGTNTIVTNNHVAESFKNAKVLNPNAKDDAWFYPGRDGSATPFGKFKVIDVAFSPNADIAVVTVGKQNDRPDGPELGEILTPFVLKKFESSDTHVTISGYPGEKNHTQWSHENDLFTSNFTDLENPLLFYDIDTTGGQSGSPIYNDQVEVVGVHSNGGIKQTGNHGQRLNEVNYNFIVNRVNEEENKRLSAVPAA

SEQ ID NO: 4482 - protein, 519 aa, Enterococcus faecalis
KETGEGVNCLMKGNKILYILGTGIFVGSSCLFSSLFVAAEEQVYSESEVSTVLSKLEKEAISEAAAEQYTVVDRKEDAWGMKHLKLEKQTEGVTVDSDNVIIHLDRNGAVTSVTGNPVDQVVKIQSVDAIGEEGVKKIIASDNPETKDLVFLAIDKRVNNEGQLFYKVRVTSSPTGDPVSLVYKVNATDGTIMEKQDLTEHVGSEVTLKNSFQVAFNVPVEKSNTGIALHGTDNTGVYHAVVDGKNNYSIIQAPSLVALNQNAVDAYTHGKFVKTYYEDHFQRHSIDDREMPICSVVDEQHPDAYDNAFWDGKAMRYGETSTPTGKTYASSLDVVGHEMTHGVTEHTAGLEYLGQSGALNESYSDLMGYIISGASNPEIGADTQSVDRKTGIRNLQTPSKHGQPETMAQYDDRARYKGTPYYDQGGVHYNSGIINRIGYTIIQNLGIEKAQTIFYSSLVNYLTPKAQFSDARDAMLAAAKVQYGDEAASVVSAAFNSAGIGAKEDIQVNQPSESVLVNE

SEQ ID NO: 4483 - protein, 317 aa, Enterococcus faecalis
QLVVKTANGVFLRLNRVLENSRIFFGCLLLLLILLLLFVFLISPEISPDFMRGFVTVNSSKLELLISVGLFLILIGLVIEAYLEEQRINTQLLNNLTIYTEKIESINEELAMFRHDYKNLLYSLQIAISYEDILEIKRIYEETIAPTKKIIDNEEFELMKLNRLKNMELKALISMKINTAKQAKLKVIVDVPEVFILDTSIDLVVVIRLLAILLDNAIENSAKSELKMFAISIFNKNETQEFVITNSVQAEFDFKVMKKTKFSSKSNPEEHGWGLLYVKEIVDFSDQFDLQTSFNEGAVTQHLIIEKNHNSKKVVNE

SEQ ID NO: 4484 - protein, 97 aa, Enterococcus faecalis
GMDKMKAITFFDLDGTLLDGTSQITPEITAAVAALKDNQILPLIATGRTLCEIQPIMKASGIDSAIVMNGQFIHYEGKTIYSDEFTTVDECNVHHEL

SEQ ID NO: 4485 - protein, 243 aa, Enterococcus faecalis
GVNEMNILMIEDNESVSEMMQMFFLNEGWEATFKDDGKEGLATFLASPEKWDMITLDLNLPIMDGIAVCPEIRQVSANVPIIMLTARDSESDQVIGLEMGADDYVTKPFSPLTLIARMKALHRRAEVAEAAHDTSENTDETFDVITDHFKMNTKTRETYLDNQLIEGLTPKEFDLLYTLAKKPRQVFSREQLLELVWDYQYFGDERTVDAHIKKLRQKIEKVGPQVIQTVWGVGYKFDDSGVA

SEQ ID NO: 4486 - protein, 497 aa, Enterococcus faecalis
IRRFRCCLMKYLYQQLLAFIGVIALIILIVGTSFTQLTKRTMQENNYEQLYGYAESALETRDFFINVAGVSDRDVLSYSFQLTERVLQKQDVQFVFINKDREVQYPPVDSTKKLDFSLIDKNWDQIMKGNRVYATENIDIYGARNTSSYVMLPVYASNQSSDKKVIIGSLVITQPAKNVDRSVQSVTQNLIKGFIFSGVIALLLSYLFATFQVKRINRMRKATKEITSGNFDIQLPVHDKDEFDDLAEDFNKMAASLKESQEEINRQEERRRQFMADASHEMRTPLTTINGLLEGLQYNAIPENQKENAIKLMQNETARLIRLVNENLDYEKIRTNQIQIVVKKFNGTEALENIVTQLTAKAEAAGNQLYLDTTEPIDVYADYDRFVQVVVNIVQNAIQFTENGEIHIALEKGYLETIVRISDTGIGMTEEQILNIWDRYYKVDPSRKNTKYGESGLGLPIVQQLVRLHKGKINVESELGKGTTFIISFPDVEITEN

SEQ ID NO: 4487 - protein, 70 aa, Enterococcus faecalis
AYQSFNNWSVCIKEKLMLRVNLVKAPRLLFHFLMLKLLKTKENVWSQSVPDVFFSLITHVETGGAHRDYQ

SEQ ID NO: 4488 - protein, 190 aa, Enterococcus faecalis
EIREGFSMNVTPSFKKITEKKSSFDALALREVYGIIYSAPEQELALADFFQTNQLTITRLSSSETFLPYLPLEENLFIASTIKERDRKVVLAEAFQVFQLEPALLGRSFTSFTTFEKIKMRIIQLLLSKTSTLVIDDIFSSLTIGQRQEILPQLKIAVQKRNKRLLFLTKDPQIIDSPYVHPLSLHALLN

SEQ ID NO: 4489 - protein, 218 aa, Enterococcus faecalis
KNHVNHRIFFFLFSFLLTGLFNLIDFEKEFLRTMPDFVDIEKQTSYHYQLIQYYWHLYLGSVIFFGVTFLLLMYVTLRIKKEEIHTWYHMHFSNMYVTKQLLLELCLPALLGIFSFLLFTLMFQETYNTVLWAARDAILQWSHLETPAFLAKSTDQDVTITNIQHLGIQTIQAFSFDFKSMQSLYTIRNCFVNCLILLGIPLVCGTPFTLIYLRTHKK

SEQ ID NO: 4490 - protein, 163 aa, Enterococcus faecalis
CKKLFLSKEICAMAREMTGLKFYFRNGETWTIDRRFIGDLWIKHITTSFGRIHGSEFVEIHPCEGFKIEIFQEGDHVQTHDINLGGLELGMFSRALKYEDIERMEILYKNGTPDLVYFPYKDKTDEGLDNIYQSTKVSEKTKNLYIVIDPTQTVDDVYAEELK

SEQ ID NO: 4491 - protein, 143 aa, Enterococcus faecalis
TRSSAFVCQKTTFKRRESIMPTEMFTKEFLVKESQTAKMLGSGDLEVLGTPALAAMIEQTAKEAVKDQLSVGETTVGTVLELRHLFPSAVGATIVVTMTSIEQTAHKIRYEFVAYEGERQIAKGSHQRAVVEIDSFLKRITKD

SEQ ID NO: 4492 - protein, 435 aa, Enterococcus faecalis
SAFIHDRSSVSLSASGTENRTTLRIGTDAMKLTTIPNEFKEAAPVIREINAQGFEAYFVGGSVRDALLNKPIHDVDIATSAYPEEIKQIFKRTVDVGIEHGTVLVLMEDQQYEVTTFRTESTYQDFRRPDEVTFVRSLKEDLKRRDFTINALALDSTGEIIDLFDGIEDLTNQTIRAVGNPHERFHEDALRMMRGLRFASQLDFKIEEKTLAAIAEFHPLLEKISVERITIEFVKMLLGVNRQGGLAPFIETECYQYCPKLREQGAGLFRLMDLPARQIETEAEAWTLLIQSLNLPEAEIRSFLKAWKLSNQLIQNVSQLVRGLRFRLSNDWQPMMLYELGEESAVLVERLLYYYQQESQVQVTKELVKALPIHQRHELAITGKDLLAVLEETPGKWLGELIAEIEQHVVEGSLENKQEVLLSFAKKQRSKGEKA

SEQ ID NO: 4493 - protein, 285 aa, Enterococcus faecalis
PKFLKKIWPNLTSGIAIALKERMGKHMIKIIVAGFKGRMGSTATQMVLETADFELVGVYDPHEAQETVSFNDETAIPVFQRLEEVLAVKPDVWIDFTVPEAAYPNTRFALEHGMAPVVGTTGFTEEQINELTNLSREKAIGGLIAPNFAIGAVLMMQFAQKAAQYFPDVEIIELHHDNKLDAPSGTAIKTAEMIQEVRPAKKQGNPQEVESIPGARGADFEGLRIHSVRLPGLVAHQQVQFGSVGEGLTIRHDSYDRRSFMTGVALACRQVVQRTELLYGLEQML

SEQ ID NO: 4494 - protein, 123 aa, Enterococcus faecalis
SKKGWGKMSESEQRSLQSMQTEVDDYIQQFKTGYFSPLGQMARLTEEVGELAREVNHYYGEKQKKADEKPKTVSEELGDVFFVLISMANSLEIDLTEVFEENMAKFNKRDRYRFERKDGKTHD

SEQ ID NO: 4495 - protein, 294 aa, Enterococcus faecalis
VEEQRFYFKDVLFIVLGSCIYAFGLVTFNIANDLAEGGVTGITLILRALFHFNPAYTTLLINIPLLLIGGKILGKRSLYYTLIGTVSLSVFLWFWQKFPVEINLDHDLLIAALLAGLAAGFGSGLVYRVGGTTGGTDVIARIFEKYFGISMGRSLLLFDVAVLLLSLTYIDVKRMMYTLIVSFVFSRVVDSVLDGAYAAKGILIVSNHSEEIGQSLMASLERGVTYLNGEGAYSQVEKRVLYTVVSPREIMEVKRIANEIDEKAFVSIINVHEAIGEGFTYAKPSKQRRFKLKQ

SEQ ID NO: 4496 - protein, 84 aa, Enterococcus faecalis
  MISC_FEATURE (3)..(3): Amino acid 3 is Xaa wherein Xaa = any amino acid.
RSXCVFPEAWQTSQYLSVLEDNPFAPWNEQVDQEVARAIDQYFKQEEQTQRMALLKAQIDDALETGNKEAFLELSDELNRLKQQ

SEQ ID NO: 4497 - protein, 242 aa, Enterococcus faecalis
SDSQYETKVGGKTMWKIGDVEIPNRVVVAPMAGISNAAFRVTVKEFGAGLVVCEMISDKGIKLRNKKTLEMLYIDEREYPLSVQIFGGDKETLVEAAKFVEENTQAAIIDINMGCPVNKIIKAEAGAKWLLDPNKVHEMVHAVSSAVSLPVTVKMRTGWDEDHLYAVDNALAAEQAGASAIAMHGRTRVQMYEGTANWDVLKEVKKHLTIPFMGNDDVKTLEDAKRMLEYVGADGVMIGRAA

SEQ ID NO: 4498 - protein, 314 aa, Enterococcus faecalis
YYLTNGQKSTKRRGKRMEDYLVKALCYKGSIRAYAISATETVSEAQRRHDTWSSSTAALGRTLIGALLLGATLKGDDKLTVKVQGNGPAGAIIVDSNGRGETKGYIKNPHVSLKLNATGKIDVRGAVGNEGIFTVIKDLGLKETFCGQTPIVSGEIGEDFTYFMAVSEQVPSAIGLGVLVDTDESVKAAGGFMIQVMPGADESTIDFIEQRLAEVPPISQLLENGETPEQVLYRLLGEDEVEILEKMPVQFKCDCSKEKFATALIAVGIDELNAMIDEDHGAEAVCQFCNNKYHYSEEELIELRDEAIRNTKQK

SEQ ID NO: 4499 - protein, 689 aa, Enterococcus faecalis
GNDNEQSPDIDYSTFQQQLEDGKVKDMTIQPTNGVYRIEGQYKEKQEVKDTGGLSLWGSTQASSKGFTTTVLPSDTTLAGIQDAAQNNKVKLVVKEQSTSGAWLSLLFSFLPLVIIFFFFYMMMSQQGGGGGGGGRVMNFGKSKAKEADKKANRVRFSDVAGAEEEKQELVEVVEFLKDPRRFAELGARIPAGVLLEGPPGTGKTLLAKAVAGEAGVPFYSISGSDFVEMFVGVGASRVRDLFETAKKNAPAIIFIDEIDAVGRQRGAGMGGGHDEREQTLNQLLVEMDGFDGNEGVIVIAATNRSDVLDPALLRPGRFDRQILVGRPDVKGREAILRVHAKNKPLADDVDLKVVAQQTPGFAGADLENVLNEAALVAARRNKKKIDASDVDEAEDRVIAGPAKKDRVINKKEREMVAYHEAGHTIVGLVLSRARVVHKVTIIPRGRAGGYMIALPKEDQFLMTKEDMFEQIVGLLGGRTAEEIIFGVQSTGASNDFEQATGIARSMVTEYGMSDKLGPVQYEGNHQVFVGRDYGQTKAYSEQVAFEIDQEVRRILMDAHTKAHEIIEAHREQHKLIAEKLLEYETLDAKAIKSLFETGKMPESADSDYPSEKEAQTFEEAKRALEEKEAQKQVEEKQDFEEAKKELHDEAEEVKVESEQTEKEVQSEEKKDSDSNSEYDRNNYEDRYK

SEQ ID NO: 4500 - protein, 399 aa, Enterococcus faecalis
VNVGQFLNRRRNVGMKQKKWLIGLVALGLVLAACGSGGSKTTSNEPATQKINVASGGELSTLDSAHYTDVYSSDMIGQVVEGLYRQDKNGDPELAMAKAEPQVSEDGLVYTFKLREAKWTNGDPVKAGDFVVAFRNVVDPAYGSSSSNQMDIFKNGRAVREGQATMEEFGVKAIDDQTLKLTLENPIPYLAQVLVGTPFMPKNEAFAKEKGTAYGTSADNFVGNGPFVISGWDGNSETWKLKKNDHYWDKEHVKLNEIDVQVVKEIGTGANLFDNGDLYYTVLADTYALQYKESKQAHFVPKAMVGYLSPNHRREITGNEHVRKAFLQAIDKETFAKEILGDGSTALNGFVPANFAKNPDTGEDFRKENGDLLPYNIKEAQANWNKAKENWANIKLNWN

SEQ ID NO: 4501 - protein, 174 aa, Enterococcus faecalis
LEQSERKLGKYKIELELISPDSAIAKKTIEFVQGQLQQNLPGLTIKLKSLPLQNRLDLQTAGNYDLAFGTWTPDYADPINFLEFYDSKSGLNTSGYNDSAYDAGLQKVRKDYANEPEKRWNELLSLEKTLIEKDAGVLPLFQGAIGYLKSDRLQGLQVFSFGRTVSYRLAYVEE

SEQ ID NO: 4502 - protein, 85 aa, Enterococcus faecalis
VFQMFSFLWALIVGGIIGAIAGAILGKDVPGGIIGNIIVGFLGSWVASLLLPSLGPVIGGFPIISALLGAIICIAIYSFIVNRKA

SEQ ID NO: 4503 - protein, 87 aa, Enterococcus faecalis
TAPLDPKFTPGFSDVKIAVFKGVMIVSKASKYASLVKKRLLFNDSMLFAPISLIQRITRALIFFNYRLMNKTAYYESRISLTLNLTY

SEQ ID NO: 4504 - protein, 404 aa, Enterococcus faecalis
IKLMGAKSMESLKSNLFLTREAYLEAFETIMTPLKTAILTSEKPGVNFGSSGAVYDQQHAEMEALIRPLWGIGPYWVTCKDDVLRDAYVEKLIAGTDPSSPDYWGVIVDYDQYIVEAAALSLTLLLHKTYFWSCFSEKQQENIMVWLNKALGCKIPKNNWTFFKVLIRLALEGCGQVINQAELEEELALIECMYLGDGWYMDGKTTQRDYYISFAFHYYSLIYVKFMRERDPIRAKRFTERAVMFAQDYLYYFDEEGEALPYGRSQTYRFAQGAFFAALIFAEVEALPWGQIKTLLAKHLHCWMQQAIFTYDGRLSIGYHYENLVMAEGYNAPGSPYWAFKTFLLLAVDQDHPFWRAEPLAIKREEKRLIEKGNMLLIHPKMKTHVLGYPAGLWLENHYSPRRI

SEQ ID NO: 4505 - protein, 158 aa, Enterococcus faecalis
ITMTIPYPEKYMKPELGIGKLANYQGVQADSLVVGVGGLGFGVGVQVTEDVATTYKDGQFYGISYAKNYVEEIPYGDVEKVGKYKEHEMVPILRKGAIWVKVDEDVLAGENAKALSTGNFGKATISSDPATTPSDTVIGTFKTTASAGNLAVLQINLP

SEQ ID NO: 4506 - protein, 293 aa, Enterococcus faecalis
MGNDVTATLEARDLQEIDKVIYQAPQEELVARTMFNVKTDINPGAETYAYNVMTRSGAAKIIANGADDLPLVDIDMKRYQSPIFTIAAGIRYSRQEIRQAQMMGTSIDATKAEVARRTIAEKENSFIFVGDPKVNHKGVANAEGIQVINSPKKWKEMTSEEIVEQLRTSRAKITIIPGFKGSSLKLMVAPEQYEELNRRYGEYDARSIMKVVQENGWFSSIEQVYDLKGVGTDNSDSFIIMDTKPSTCEILLPEDIVRLEVEWSFPNWKVPFVERCGGALIRTPYAIVRVDGI

SEQ ID NO: 4507 - protein, 148 aa, Enterococcus faecalis
LERHMQLFVWMVFKNKEVKIMLVHNKGSYIRHIGNVRLIPGVNDLDNSDAEEFIKGMELPLNKSLERLGEIEILDHITKGKSKKAVGFTELSANKAVESIADTFDLELLEKWLEEEQANKNRTTVVKAIENQIDDIKNPDEDSVVNPE

SEQ ID NO: 4508 - protein, 120 aa, Enterococcus faecalis
SRIGSGTMPKSTVENVRLTAAELVGVNNDSIKLFIDDAWLEVDALPFKEEVKEKACRYLACHLAVLNNQNTKSEQVGSLKKEYSGFHSTFTDLKRTVYGQEYLRLYNEYAKKGSLSLVVI

SEQ ID NO: 4509 - protein, 227 aa, Enterococcus faecalis
KNRLWSRVFTSLQRIRKKRFIEFGCDLMKVTENNRIIKLIDELNQLNKYSLQIGIFGEDDSFIAMLAQVHEFGVTIRPKGRFLVIPLMKKYRGKSPRQFDLFFMQTKENHKFLVRNKGKDQLEFAYMLAEQITIPERSFIRSTFDEQAKAWSDYALNLVKKLIAGKMTAEELTNKVGARMQRDIQRIIRNLSDPPNSPITVNNKKSSNPLIDTGKLRQSVTYKVVKG

SEQ ID NO: 4510 - protein, 124 aa, Enterococcus faecalis
GGERVMQRMNFSSLIETFAVDFQLVLPSVEGAGKYIHGEWFPTNEEPKTVSGAIIPYDNRTIYQSGGTLTSSDRQLAYVGSIPLGSKIIDMGKEYKVESEEPYAEHYADVNLYRLKAVTNNAAN

SEQ ID NO: 4511 - protein, 160 aa, Enterococcus faecalis
PIMPQINGAFSYELLADELIAIVKKSTGLQLIESSTAGPQPDKPFFSYEVISPYIPVTIDVTDNEVFELVVSIKCHTDSSIQALNLSEQLRKHLNGFSVKVDLQNSKIALVSTTQSQKRDNFISIDYERLAGFDARFRVQDSYVDNAVIIENIDIQEENK

SEQ ID NO: 4512 - protein, 360 aa, Enterococcus faecalis
QCCDYRKYRHTGGKQMIEKITDVNVKIDIMHPQPIVGLGNPAIFVQGSTQNYKEYTSLETLAKDFATTTTVYKKAEIIWKQENKPQTIAVVTFVADTPTSPEQPDSLIAGSGIIAAATSYFYNDWHFALLANFVEADALALSNLIEENEFKFLVIQTATVDELTVFTGNNLTIGLVHPLEEFLDAALIGNTASLTVGSVTWKFRHNLVGITPNTLTTSQLQAIEKANAIAYVSKAGIPQTSEGKTMSGEFIDALHGDHWVKSNIETNVQRLLSTTDKLTFDSNGIALLDTTVANVLETAFNNGIVDIVDETGVGNYSVTALGRQDLNPDDIAARNYKGLSFKYKRSGAIHTVDVTGTIEV

SEQ ID NO: 4513 - protein, 105 aa, Enterococcus faecalis
LMQSMTTYDAKEVSTIIDNVVQFGFQDGDMVSFSKDNSYIEVPTDAQRQSSAANNNDNLGTSTINLSQNSPCYRQLMALANGRKEFAISVTHATDKAWASQAYIE

SEQ ID NO: 4514 - protein, 123 aa, Enterococcus faecalis
EEFIMTKKDEVKELEVKNNIPEAEKKPFNKFGKQEKHTVEDVEYTFQFPGTRAAQAILDNSKGPSNTFSDVAYHSQLMDSVIVTPKLNWDYWDEHEGYREVMALADNLFVECLTSHGPSHTGW

SEQ ID NO: 4515 - protein, 517 aa, Enterococcus faecalis
  MISC_FEATURE (477)..(500): Amino acid 477 & 500 are Xaa wherein Xaa = any amino acid.
RLAQYLFRYIWRMHIWGSAARLEKELRTQLFHHFTKMDSIFYQKYRTGDLMAHATNDLNAIQNVAGAGILTFADSVITGGTTIIAMVLFVDWRLTLIALLPLPLLAVTSRVLGSKLHDAFRDSQAAFSAINDKTQESITGIKVIKTFGQEKEDLADFTEKIDDAIVKNKRTNFLDALFDPFITLIIGVSYVLTIIIGGRFIMEGTISLGQLVSFIAYIGMLVWPMFAIGRLFNVLERGNASYDRVNELLHEKTHIIERKDAIKTMAQGTISMKIDSFSYPKEETVALENIQFSLQEGETLGIVGKTGAGKTTILKLLMREYDQYQGTISFGKHNIKNYTLDALMGAMGYVPQDHFLFSMTVRDNIRFAKPHLEQAAVEQAAALAFINQEIKAFPEGYDTMVGERGVSLSGGQKQRISIARALIVEPELLILDDALSAVDANTEEAILSNLKETRQEKTTIITAHRLSSVMHAKEILXLDEGKIIERGTHPQLLAHKGWYXRMWEKQQLKTKIEGSES

SEQ ID NO: 4516 - protein, 596 aa, Enterococcus faecalis
ELMEEKYQSEWSLEIPMKEQLTIVQRLFRFAKPFRRMFYTAILFAFGLSIINILLPRVIQVFMDNYLTPKTATMQVILTFAAIYFFGVIVKSIVWFFQWYLYSMASLKTYQYIRVKLFEKLHTLGMRYFDQTPAGSTVSRVTNDTETLFEFWYVFLMVITGIFAVISSFFAMFQLSPEISFYCLIFLPILLVVIWYYQKFSSKLYRSMREKLSQLNTKLNEYISGMQIIQQFRQEKRLEKEFEETNDDYLKTRVAMIRMNSLLLSPIINLLYTLAIALALTMFGIDALHSPVEAGMIYAFVTYVQAFFNPMTQMMDFLSIFTDGIVAGSRILKIMDTEELTPQQSVGANGEIIRGKIEFRNVTFSYDGKNEVLKNISFVANPGETVALVGHTGSGKSSIINVLMRFYEFYEGQILIDDRDIRDFPMTELREKMGLVLQDAFMFYGDIAGNIRLLNPNITDEQIKQAAEFVQADKFIHTLPNTYHAKVIERGASYSSGQRQLISFARTIVTDPKILVLDEATANIDTETEGLIQEGLAKMRQGRTTIAIAHRLSTIRDANLILVLDKGQIVERGTHETLLAEGGLYADMYQLQSTEV

SEQ ID NO: 4517 - protein, 270 aa, Enterococcus faecalis
KWYDMKREKQTRKLGGTVKPVIVKNVRIGEGNPKIVVPIVAPTAEDILAEATASQTLDCDLVEWRLDYYENVADFSDVCNLSQQVMERLGQKPLLLTFRTQKEGGEMAFSEENYFALYHELVKKGALDLLDIELFANPLAADTLIHEAKKAGIKIVLCNHDFQKTPSQEEIVARLRQMQMRQADICKIAVMPQDATDVLTLLSATNEMYTHYASVPIVTMSMGQLGMISRVTGQLFGSALTFGSAQQASAPGQLSVQVLRNYLKTFEQNK

SEQ ID NO: 4518 - protein, 212 aa, Enterococcus faecalis
SRNRSTVRIGTNFWLRPASVCTRPTIRTSIKKLFKDIRTKQVIQKVKKVAKKKTQQKTNAMRMVEQHKVPYKEYEFAWSEDHLSAESVAESLGIEKGRIFKTLVTVGNKTGPVVAVIPGNQELDLKKLAKASGNKKVEMLHLKDLEATTGYIRGGCSPIGMKKQFPTYLAEEAQQYSAIIVSAGKRGMQIELAPEAILSLTNGQFAEITTKE

SEQ ID NO: 4519 - protein, 81 aa, Enterococcus faecalis
MDSEFAFNISVLASGSTGNSLFIETNQKEVLVDAGLSGKKITSLLAEVNRKPEDLDAILVTHEHRDHIHGVGVLARKSKLE

SEQ ID NO: 4520 - protein, 304 aa, Enterococcus faecalis
QQLVHCNGLGKTITKLGGGLMDFKRIEWIFFLAFLGLNIFLFGIYREGQQEESNVSSSSQTESIESRLEKDNISYKGTLSSERLEGYYLSGEQTNFSAALKIQREKNKNFLRNGLQIADNTLTSVPSKNYFIDPKKIDKDLSTFLNEKNALLFGDEYQYLPEFSHLKEPTAEIVAAQLYKGIRFRDDTAKLSILADTSGELWKISKYSQTHIENIEELRDKTDLYSNRDAIDTLYMNNRIPSNSKITFIKLAYSRIYKIREKNVYVPVWFVGISTGEDSVEIEQVNAVSNTIITNNTVPKVEKH

SEQ ID NO: 4521 - protein, 441 aa, Enterococcus faecalis
RGLVGMMKLSEWITRIGLILMVILSIYFSVNIWLNSAKKIPEMKSGSQVTTAVNEKAIGDVYLPLQLIRITDGKAMQSNRETLISNVQNDIKMATFGKLTQVVTKNAEQLKRYNQMEQGIELLYQGPFLISDYASIYNLSINFTNFNELTDQYFTKIQLDFNENKIRFLDYDQANVYEAPMTVNKARLMGIINKEGLQYQDVSENTLTKQGQCYLTNDMKLKKYSYILASQPVTRFRNAFFNETEDIQTNEDSQDLTYTSKEERLFAEEKLGKIDFKGTLPEENKRDSIYNQSFSYVKRLGTNMGNLRYFDRTKDSVNYRTFVEGFPVFSNDLKGQVDIRITNNDGAAPSVTINTSVNTIQVPIPSEEEVTLESTEKLIKRLETAGAKKEKIQSAVIGYTWQTIEEVKQVVDLSPEWYVLYNNNWYTATDLVKQLPSLEVG

SEQ ID NO: 4522 - protein, 618 aa, Enterococcus faecalis
  MISC_FEATURE (8)..(8): Amino acid 8 is Xaa wherein Xaa = any amino acid.
EILNRSNXGMKKKVHFLQSDHLKIALSFILLLLIAIQIIGGYVIRELEATTISDFKKNMDSQVVQLSDMLSTQMSNKDLVRSDVDANLKKALSDFSNADISEARIVDDKGIIRATNDLNQQNIIGKKNDYRDLNDFTSKKYQALDNDKRVYVNVQPIQSPTGETVIGVLYVKSNLENKYQEITNTASIFFTASIIAAAISIIVTLLIARSITKPIGEMREQAIRIARGDYAGKVEVHGKDELGQLAETFNQLSERIEEAQETMEAERNRLDSVLTHMTDGVIATDRRGKVITINEMALSLLNVKNENVIGTSLLELLDIEEDYTLRKLLEEPDELLIDRSTSDREEDQMIIRVDFTMIRRESGFITGLVCVLHDVTEQEKNERERREFVSNVSHELRTPLTSMRSYIEALSEGAWENPEIAPNFLKVTLEETDRMIRMINDLLNLSRMDSGNTHLQLEYVNFNELINFVLDRFDMMIENEQKNYKICREFTKRDLWVELDTDKVIQVLDNILNNAIKYSPDGGVITCRLVETHNNVVFSISDQGLGIPKKDLGKVFERFYRVDKARARAQGGTGLGLAISKEVIRAHNGSIWVESTEGEGSTFYISLPYEPYEEDWWE

SEQ ID NO: 4523 - protein, 91 aa, Enterococcus faecalis
PILLMQTCSQTGENIGLPPGNWVIYNLPNISNKGGVGNFIQPFGLRLFGDLRPMNVTVSRLREKFEDSPSHPTYLLTRRGVGYYLRNPEQE

SEQ ID NO: 4524 - protein, 529 aa, Enterococcus faecalis
WRWWALTSIIWEPMNENSKQYAKFIEELTIPYYFVNHSTNELPSLAGLYEEASYVLTQELLQNNHKKISYFVTNPKYKEAIIAGYKKALFDVNLPFSKENILTTIPADFSNQLITDGITGILTDDYTQAVFLEQLLKQSGLRTPDNYSLLAIKRKIDRSFLPDHISSVLLDTETFGSKLALLLLNKRKEKTALINEAEKLVLDHKNTLGMSSVNPHSKMIVVGSLNVDNYLYSTNLPHNGKTNFLSSYAKFPGGKGLNQAVGLTKLGHQATLIGCLGSDTDANYLYKELEKYHVTTDGITRIQDTETGQAYIYVETSGDSMISILPGANTALTPKKIAQQKHLFMDASFCLIQTEIPLSAVEKACEIAQHSGVPIILKPAAIHHIPVNILEKVDFFIPNEDELLELQPDTGTLEEKAAYFLEMGVKNVIVTLGKKGVLLKTPQVCHYFPATENIAVDSTGASDSFISALASYLSKGYPTEAAIQIAIQAAGFSVSKEGVIDSLVDHVTLENYLIKKEPALFAHRNTCID

SEQ ID NO: 4525 - protein, 504 aa, Enterococcus faecalis
LRSESHQNTRCHKNIFTFKENTKKLAVFLYLAKQTNLDLSSVARKFALSTKNLSIYLREIQEDLATLPENTLEIQIHHGKISLHTTSNDFLSHYFLLFNYYCVHSTDFILFQAIIKKENNSVWKVSQETNFSSSYIYKRLNNINKLFGLYGISVHFSPSASKVITGSEFQVLYAFLDVYWTIFLNTLALPRYTSTYFEDILTQHIKPEILERLEHASLLKLNLLLHIAKYRFPYTCEDDLQKEFEEHPYLRLFSDSKQTIFCSQSNFSEDQQRVVDIIAPIAIDNFDSAKRAKDLLAALNEISCPEYFYVDSLLTNFCEVFQIPKMREFDRHYFLLILFKNIIYNQLFISQQPNTAILDFLVNKNSTYQKDLQKKIYAFYQNFSAHSPYQLRFKDQENPIWTCELLLRIYKHYSPRKKIKIGVAYSRDFYIASFIMMKIKQAFSEDIIFERTDFSGCDIVITDYPLFDLPKEIDRIYILEEELTREDWELIFSKISIAIFDLQY

SEQ ID NO: 4526 - protein, 64 aa, Enterococcus faecalis
IVFEGNIEKNSNIQATYKLFSVRLKLAEVVCKSLVFIMAGETGWRLMFVLILQIKNGDTYFTEN

SEQ ID NO: 4527 - protein, 108 aa, Enterococcus faecalis
IRGHSLVKSVYSLSDYLDTSKEFIKAYPIDKIADVQTGYILKRNQGYTDISKYYLFKDGTGFELEVSVDQLEKVKDPKDYSSFVKTYAKEVTFIEKSFKFESTDEESR

SEQ ID NO: 4528 - protein, 192 aa, Enterococcus faecalis
KQMVQALPSNIGIQQVTLKVADLDKMVNFYTKTIGLKLLKQGEGRAWLAPQGTNDAILVLKELTAGEENQGTTGLYHIAFLLPTRKDLGNMLLWLLQENVQIGAADHGYSEALYLSDPENNGIEIYWDKPEEVWDIRPNGEIIGVTEELDGDSLAAEADGHWLGISEGSKIGHIHLKVADLDATETFYKNLG

SEQ ID NO: 4529 - protein, 214 aa, Enterococcus faecalis
TKLNEFTEEIRKDEHIMSKFTEMMKNRRSIYALGENLPISKEEVTALVKEVVRESPTAFNSQTQRVVFLFGDAHKKLWAMTEDALKPLTPAEAFPNTQAKLQGFAAGAGTILFFEDTDIVKNLQDSFPLYADNFPVWSEQATGLTQANVWTALAQENIGANLQHYNPVIDEAVAAEWSIPANWNLRAQMVIGSIEAPAGEKEYMEDSARFKEFN

SEQ ID NO: 4530 - protein, 314 aa, Enterococcus faecalis
GESMTTIREIARLSGSSVTTVSRVINHHPYVSEEKRLKIQAIIDELGYKPNILARNLSFGKSNTLGVMVPYTNQPYFDAILSGIIHQAFQQGMMVSLLPTDYDKEVEKSYLEKMATGAFDGMIVLSKANPLSVFAPYKEQVVFCEKIEDPSYASIYIDRLTVYRRVFQALKQQGCSEVAITINRAPEKSTSARYLVDAYQEIYGAIPENRLFKDCLTYEDGCEVGRHCGQDPTLQAVVTNGDEIAAGIQAVIERPVFLVGQEQTLLSEILNFSTICHPLMELGEKATHLFQEKRPKTIQLTSTFINRQPDFSFS

SEQ ID NO: 4531 - protein, 83 aa, Enterococcus faecalis
KARNFSNCCHTFTSLLYKIELNKAQSLSRNQQNDKRSPAKQKKFPEYPPAVSSATPLSDGTEFLDAKSYSIFWDYLTADFWPS

SEQ ID NO: 4532 - protein, 64 aa, Enterococcus faecalis
LQTFGRRSHRDKIVIHTKSIAYLHYNIHFHALQYFDTPSLPYETRTRARGKIKKVRPCYTRCII

SEQ ID NO: 4533 - protein, 114 aa, Enterococcus faecalis
KQRMSAMETVTVATKSDLLTNLNKQTDEIIISGALAQEIYHLKKQQLTETEEMGFLVGSQGAGSFLTYLIEKLSYINSALSPEEQKIEHAILRLYVIKKLTPETTLLRLKQLDY

SEQ ID NO: 4534 - protein, 183 aa, Enterococcus faecalis
YNYLYSSSHHCHYRLTNGILEVTDKSFYLKKCLGNVWGGMFMCQPQEKKKEISVAKLRYRFEVPMIIIGFVLLFFALGLVALLILSDLPIPDWLLIVLIAPIAPVIAFFTIRYMYMDTASNGVEITENQLPEIYSLYIDLAKEMGFGTKKIKDATSLFNQREWCLKRFCGKMLFTQTLCCHSQ

SEQ ID NO: 4535 - protein, 225 aa, Enterococcus faecalis
LHQLRQSLLFLPFVICTWILLLTEWKLQKISYQKFIPCILIWQKKWALALKKLRMPRLYLINGNGVLNAFAAKCSLHRRYVVIHSDLLDIAYNTGDFSLIRFILAHELGHHKCGHTNLWRLMLSIILKPVALDKSFTRTQEYTADRAGLYYAEEGALSMIYLFSGKYMGSRVDLEEYFHSIDLHDDTIWLKLSNFLSDHPVGFRRMQTLKKAKDTGNWDVHGKFF

SEQ ID NO: 4536 - protein, 269 aa, Enterococcus faecalis
LPYPVAGHIKPIIEPLHKMGATGAEISGRNDLLIDGKKFSGNAMYTKKGKMYTHGTLMYDVDLAEVQRVLTVSKKKIESKGTKSVRGRVTNLRPYLDEKYQQLTIEEFRNRLLMELFDVESLTEIAEKEYVLTKADQQEIRKLVAEVYGNEAWIFGEAPKFTIKKEEKFKGGIVDARLTVEKGKIIELTIYGDYFAKKETTEIVAALLGVDYQYSSIWQALAAFNFENYFVNITKATICSFIGGLINVLGQKLKNLLSQHVYLMMVGSC

SEQ ID NO: 4537 - protein, 182 aa, Enterococcus faecalis
VAIRGNALWANHAIGKREERLTVMTTFYPMYDFTKQVVGDEGEVELLIPAGTEPHDYEPSAKDLAKITDADVFVYNSKELETWVPNVIENLDTKKVSIVEASQSIQLMQGTEEEESGEEGHEGHNHSHELDPHVWLDPVLAQKEVTAIRDALIKKYPEKKAVFEKNTVAYLEKLTALDKEYQ

SEQ ID NO: 4538 - protein, 66 aa, Enterococcus faecalis
KDAYQLRSFFMGKISIAIDGPVSSGKSTVAKILAKQLNYVYCDTGAMYRAITYLALQNQIGLHHGK

SEQ ID NO: 4539 - protein, 62 aa, Enterococcus faecalis
AEISERCFASFEGFRLIDFSLEIRHQSKSKFFCSDFNIKEEAHLKRCISVKEFFHGENQYCY

SEQ ID NO: 4540 - protein, 205 aa, Enterococcus faecalis
KDQKKNQVREPWEQSIYEPDQNGGVSRLAKRQQQRGNSLFLTVLVILLLLIIAIPIGTFLWMMQDKKPNESASKNSQPSSSLVQSSSKEKKKESTSKSVESSEPASSQPAENTTPSSSDAAAQQQQDQQAQQQQQQQQEQQQQQEAQNQQQQQAQNQQPVYDTVQSGEGARQVAERNGMTLEQILALNPGIDTSVFYPGQPLRIK

SEQ ID NO: 4541 - protein, 338 aa, Enterococcus faecalis
GHLIEQLEQHYHGMIIVLYTKNCQSYAASLNQKGIKTILFDKKTLLITTAISYLKSAPLIFVDNYFPELAILKKKQVVIQLWHANGALKQFGWGAYHTKHRSSKDQIRFQKVYDKMNYFIVNSLKMEAIFRNNYRLENAQFCHFGSPRLAYLEKLEVGETNQNNKVLYAPTYRKGMNEMMLVINQAIKAFSAMPNFHFYMKLHPSIQLDAIELPRNVSIWEKHIFESFSEIGYLITDYSSVVFEYMHVKEQPNILFFCPDLEKYALNPGIEPDFFEYLPGPLVENEKQLIVALSNFSINSYKDNITRINEEWNQYQSKETINKIVELVERILGGFCEK

SEQ ID NO: 4542 - protein, 255 aa, Enterococcus faecalis
  MISC_FEATURE (104)..(104): Amino acid 104 is Xaa wherein Xaa = any amino acid.
RESWGDFVKSKVRTEYIGGLPVDVLTHQEIMDDLESYLKAKEKMIVTSVNPQISLLAFEHPEVKLYLKRATHRIADGIGVVKASKLMGGSIRERVTGIDVMDNXLEYANQHKERIFLYGAKQEVVEAAAKNIQRQYPGIVISGILHGYTKKKQQEIVEQINKAEPRFVFVALGSPKQEIFLEQTIDHLTANVFLDVGGTFDVLAGSVKRAPEFYINHNLEWLYRCLTMKRYDRLMQIPKYIYLTIKYRNNKSRGQ

SEQ ID NO: 4543 - protein, 197 aa, Enterococcus faecalis
MIILFIWENDLDTTFYIVKIEKDEKFILRVPPIHKLSKFVQNNQWNSLIEELRKLSSYEVTEYIIIKKAMLFSYLFEDDKEIVISNQSERHLIDQNGKEWFLPKGKVAVNQEVLSEYLRFSHSDAERSFEHQEHIFRLTKIKLLKDKNPLKLQKQLKQLKKATTTSFSIKSLSKLLLIYTATENKKFDRKTIKVNQE

SEQ ID NO: 4544 - protein, 143 aa, Enterococcus faecalis
RRNIKVQMEVFMKKILTYGTFDLLHYGHINLLKKAKQQGDYLIVGLSTDAFNLEKKKQSYFSYEKRKQLLEAIRYVDLVIPETSWKQKVSDIAEFKIDTLVMGDDWQGAFDFLEVETTAKVLYLPRTPEVSTTQIKKELYYSE

SEQ ID NO: 4545 - protein, 61 aa, Enterococcus faecalis
TENTDFFSTHFFKISFIKLNVPTSLTNQRNNADQSLTFGKDNLEKSLLEKYQGDFLLFTII

SEQ ID NO: 4546 - protein, 368 aa, Enterococcus faecalis
TSRYIQLYKGDLEEMSRKKVGVFCLFLFFTFFIIVPKVEATEEMKTKFTVTPVLPENQVSGTSSYYDLILAPKQSSTIVLDIKNKTDEKLSIVLTLANASTNDNGLIVYNDFDKPLDSSLKVPLTDLVTLENEEVSVPPHQTVSAKMKVKGLDQPIKGVVLGGVYAHLKDEKTEEENQTTGLTSRYGFNVAIAMRSAANVPLTEVNQLKLAKVTPTIALGAKSLKAVIQNPYAAIFPEVRLEGQVIKKGSSKKIAQRTLKNVRFAPNSSMNFHLDLGKQPLDAGTYIFTGRAILQQDEQQSWPFQQEFTINTREAKKLNQEATVKWVLPTWWLPTFYTLLVITIGAIYSVIWRNNYQKTSEKESENNG

SEQ ID NO: 4547 - protein, 103 aa, Enterococcus faecalis
  MISC_FEATURE (96)..(96): Amino acid 96 is Xaa wherein Xaa = any amino acid.
SQLGQFIVSFGAIIIKKQAKRRVRIMASWFWLSGGLAVICFMFFLFSLVTSMSFIQHAKEPRSILKETLLSWLMLLLSGGWIAIGLLLYFSLKNLXTKRAFIG

SEQ ID NO: 4548 - protein, 103 aa, Enterococcus faecalis
HKKLLASGGLFDLDQLEEDIAEAENRMGEPGFWDNTETAQKLINETNSLKEKYQQFHQLSEEIDELTVMFELQQEEYDAEIQEELEERIHLLQERLTTYALSL

SEQ ID NO: 4549 - protein, 497 aa, Enterococcus faecalis
NKDMARITFQNYFRMYKKLAGMTGTAKTEEEEFREIYNIQVIQIPTNRPIIRDDRPDLLYPTLESKFNAVVEDIKERYHKGQPVLVGTVAVETSELLSDKLNAAKIPHEVLNAKNHFKEAEIIMNAGQKGAVTIATNMAGRGTDIKLGLGVLELGGLAVIGTERHESRRIDNQLRGRAGRQGDPGVSQFYLSLEDDLMKRFGSERIKTFLERMNVQEEDAVIQSKMFTRQVESAQKRVEGNNYDTRKNVLQYDDVMREQREVIYAQRQEVIMEENDLSDVLMGMVKRTIGRVVDSHTQLEKEEWNLDGIVDFAASTLVHEDTISKKDLENKSAEEIKDYLVARAQEVFEEKSQQLNGQEQLLEFEKVVILRVVDTKWTDHIDAMDQLRQSVGLRAYGQNNPLVEYQTEGYSMYNNMVGSIEYEVTRLFMKSEIRQNVQREQVAQGQAEHPETEQDAAAQSNTSAKRQPVRVDKKVGRNDLCPCGSGKKFKNCHGRNA

SEQ ID NO: 4550 - protein, 373 aa, Enterococcus faecalis
LKGTQIPMANFLKKMIENDKKELRRLEKIADKIDAHASAMEQLSDEQLREKTDEFKARYQKGETLDELLPEAFAVVREAAKRVLGLFPYRVQLMGGIVLHDGNIPEMRTGEGKTLTATMPVYLNALSGEGVHVVTVNEYLATRDSNEMGELYNFLGLSVGLNINSKSSDEKREAYNCDITYSTNNELGFDYLRDNMVVYRSQMVQRPLNYAIVDEVDSILIDEARTPLIISGQAEKSTALYTRADNFVKRLKEDEDYKIDIQSKTIGLTEAGIEKAEQTFGLDNLYDIENTALTHHLDQALRANYIMLLDIDYVVQDNKVLIVDQFTGRIMDGRRYSDGLHQAIEAKEGVEIEDETKTWRGLRSKTTSGCTKN

SEQ ID NO: 4551 - protein, 76 aa, Enterococcus faecalis
LPPHCLCEKPIEGIATLGALQHQFIPPTINVENQDEAITVNVVLNESKEHKFDYALSNSLGFGGHNAVICLKRWED

SEQ ID NO: 4552 - protein, 168 aa, Enterococcus faecalis
NAGRINMQLEEVKALLTQFDQSTLTEFDLREGSFELYMNKNTVSGRSAVEPVAQPQETPVAASGVSVPVETVSVVEETPTNTPTANEKTEEITSPIVGIVYLQPAPDKENFVKVGDTVKTGDVVCIVEAMKLMNEITATVDGVITEILVNNEDVVEFGQPLFRVAKGE

SEQ ID NO: 4553 - protein, 142 aa, Enterococcus faecalis
NMKLTITEIQEILPHRYPFLLLDSVEEVIPGERVVAKKNVTVNEQVFQGHFPGNPVLPGVLIIESLAQAGAVALLSMPEFKGKTAYFGGLDKAKFRQKVTPGDTLILEVELLKVRASAGMGKGVAKVNGKKVAEAELTFMIG

SEQ ID NO: 4554 - protein, 457 aa, Enterococcus faecalis
KMFSKVLIANRGEIAVRIIRACRELGVQTVAVYSEADQEALHTQLAYEAICIGPAKATDSYLNVQAVLSAAIVTNAEAIHPGFGFLSENSQFASMCEECNITFIGPKAETIDAMGNKINARQLMQKAKVPVIPGSDGVIDSVEEALTIAEEIGYPVMLKAAAGGGGKGIRKVLSKEELPKHFTSAQQEAKAAFGNDDMYLEKIIYPARHIEVQILGDQYGHVIHLGERDCSLQRNNQKVLEESPSIAISEEKRQMLGETAVRAAQAVHYENAGTIEFLMDPAGDFYFMEMNTRIQVEHPVTEMVTGIDLVKAQLEIASGEPLGYTQEDVIMSGHAIECRINAENPAFNFAPSPGKIQNLLLPSGGMGLRVDSAMYSGYSIPPYYDSMIAKVIVHGENRFDALMKMQRALNEIVTEGIITNAEFQLDLITHDNVLTGDYDTSFLQETFLPNWEPESNH

SEQ ID NO: 4555 - protein, 294 aa, Enterococcus faecalis
NTRSKQMALFKKKNYIRINPNRAHANDASKKPSVPDNMWAKCPSCKRTLYTKEMGAEKICPHCGYSFRIGAWERLAITVDEKSFHNWDSELVTKDPLNFPGYLEKIEKMQEKTGLDEAVLTGEATIEGQAVAIGIMDANFIMGSMGTIVGEKITRLFERATEKHLPVVIFTASGGARMQEGIFSLMQMAKISAALQRHNKAGLLYLTVLTDPTTGGVTASFAMDGDIILAEPQSLIGFAGRRVIEQTIRQELPDDFQKAEFLLEHGFVDQIVPRNLLRQRLSDLLRLHSLEGWR

SEQ ID NO: 4556 - protein, 276 aa, Enterococcus faecalis
ATCYVYILWKGGANMEKKTANDVVTLARAQDRLTTLEYIEAIFEDFLEFHGDRYFADDLAVVGGVATLQGKPVTVVGIQKGRNLPENIERNFGSPNPEGYRKALRLMKQAEKFNRPVITFVNTAGAYCGIGAEERGEGEAIAQNLLEMSDLKVPIISVIIGEGGSGGALALAVADEVWMLEHTIYAVLSPEGFASILWKDGSRAKEAAELMKITATELKELAIVDKVIPEVMNGQPLEQAKINRMLQKAFISKLTELAKLDTETLLEKRYQRFRKY

SEQ ID NO: 4557 - protein, 104 aa, Enterococcus faecalis
AKTFYLEGFIVLKPLGDRVVIRVAKEEEKTVGGIVLASVAKEKPQTGEVIAVGEGRVLENGTKVPMEVKIGDTVMFEKYSGTEVKYEGVEYLIVSAKDIIATVE

SEQ ID NO: 4558 - protein, 182 aa, Enterococcus faecalis
SSNSISLAIVTPSLVINGEPNDFSKTTLRPLGPNVTFTVSANTSTPRSIAARASSANLISFAMISSPHNFFLLLYYSVKVVYYSTVAIMSLADTIKYSTPSYFTSVPEYFSNITVSPIFTSIGTFVPFSSTRPSPTAITSPVCGFSFATDARTIPPTVFSSSFATLITTRSPNGFNTINPSK

SEQ ID NO: 4559 - protein, 545 aa, Enterococcus faecalis
GEEIMAKEIKFAEDARAAMLRGVDVLADTVKVTLGPKGRNVVLEKSFGSPLITNDGVTIAKEIELEDHFENMGAKLVSEVASKTNDIAGDGTTTATVLTQAIVREGLKNVTAGANPLGIRRGIELATKTAVEELHNISSVVDSKEAIAQVAAVSSGSEKVGQLIADAMEKVGNDGVITIEESKGIETELDVVEGMQFDRGYLSQYMVTDNDKMEAVLENPYILITDKKISNIQDILPLLEQILQQSRPLLIIADDVDGEALPTLVLNKIRGTFNVVAVKAPGFGDRRKAMLEDIAILTGGTVITDDLGLELKDTTIENLGNASKVVVDKDNTTIVEGAGSKEAIDARVHLIKNQIGETTSDFDREKLQERLAKLAGGVAVVKVGAATETELKELKLRIEDALNATRAAVKKGMVSGGGTALVNVIGKVAALEAEGDVATGIKIVVRALKEPIRQIAENAGYEGSVIVDKLKNVDLGIGYNAANGEWVNMVETGIVEPSKVTRSALQNAASVSALLLTTEAFVADKPEPVAPAPMMDPSMGMGGMM

SEQ ID NO: 4560 - protein, 132 aa, Enterococcus faecalis
PRSNCIPSTTSNSVSIPFDSSMVITPSLPTFSIASAINWPTFSEPDETAATCAIASFESTTDEILCNSSTAVFVANSIPRRIPNGLAPAVTFFKPSRTMACVKTVAVVVPSPAISFVLEATSETNFAPMFSK

SEQ ID NO: 4561 - protein, 182 aa, Enterococcus faecalis
VNTCCELLMTIRKQSDLPIWLFSRTEVISKVNRIIYLQLGADGVFDYSYDRQECMLSMSNLLQRVKRRFYPKLAIANEEQTVTKNLSERLYLIAPNLSVCLGSGEEILLTKLEFFTIEYLYKHAGQTITYEELYKNVWKDTANERKYRVANVIFHLRKKIEQDVNKPQYIKTIRSKGYMLTV

SEQ ID NO: 4562 - protein, 266 aa, Enterococcus faecalis
TRCEQTTIYQNNSFKRLYVNGVKGTKEEKKMWQFLTKNNEDEEYEKMPDFENEQSMKAQPTVTEEAIFDDEVVYAKEQSAKVKQVQQQVPTELSEESFSFVEKLEEENQLYQQSIKKLTEQLLMQTNEVEALQKQVVEKDVQLKHVKETLSDKETTITSLQKQLSEEKMQQRQTSEENLDTAVTLSQKEIGEVLLEAKRQAKETISQANQQVATVHEEMEQRLATLTRMKQVAREYQAYCEQMQTIKNESTGTYQQIEQLLAEIKR

SEQ ID NO: 4563 - protein, 519 aa, Enterococcus faecalis
RRNAMKKRKARYLKLVCIGILGIYAGASYYNSEPLIAQEETETRDESRQLSLEEKRADQANQDQGTLTSSTLNETIISSSEQQESSTQNDSSDHQENNVEPLESENSLPPQEKTIASTKPTESLQNEQPVSEERKALTEKSPHNQEPQNSTLTEKTKEPLVHSEVDNSQEKEKQAGIQQQAEANFVVQENASTSEFIRKIGEEARVIGQRHDLYASVMIAQAILESGSGNSALAAAPNYNLFGIKGAYHGQSVSFPTQEDDGKGKMTTIHADFRQYPSYKESLTDYSKLIINGLAGNPTFYHGVLKANTTNYQQATKFLTGRYATDTYYDKKLNALIETYQLTEYDQEKKKPVVTNLAEEKKPSFDKEAVKEQLKKEAVVYEVSKGDSLATISQTFGVSATAILKQNSKTQEMFYIGQKITIPQHTAATSLEPKEQALLQSLIISKSVTNALKTAEQSNGKANDSKTASTEYYEVKRGETLAKIAKKTGYSLTALKQANDLTYSVLTEGQTIALPKLKD

SEQ ID NO: 4564 - protein, 66 aa, Enterococcus faecalis
  MISC_FEATURE (4 )..(62): Amino acids 4-13, 41, 48 & 62 are Xaa wherein Xaa = any amino acid.
EKEXXXXXXXXXXGGGVGGGGGGGGFFGGGWFGGGGCVGVXWLVFWVXLFVWLGCCVGFGGXVWVG

SEQ ID NO: 4565 - protein, 159 aa, Enterococcus faecalis
MGEKVYPMTLEGKEKLEQELEELKTIKRKEIVERIKIARSFGDLSENSEYESAKDEQAFVEGRITTLENMIRFAEIIDNDGVDQDEVSIGKTVTFQELPDGEEEEYTIVGSAEADPFSGKISNDSPIAQALIGKQLGDQVIIATPGGDMTVKITKVEAN

SEQ ID NO: 4566 - protein, 251 aa, Enterococcus faecalis
MTEGGGKSMNNPWRFFIVAEALLFILALWQIVHNPGLAVLLTIGVLLVAYVSRKASKTHFNNFQFVLGVVFIVIGAMNSTAVWFMLIFGVLFIGLKGFEISGVDIAERAPWRKKQMIMVETAAKEPKNGKRFKRRWFANERIGNNIYEWDDINIDLISGDTIIDLGNTLLPKEDNIIIIRKGFGRTRILVPLGVAILLEHSTFYGTVRFEEEKYQLKNESLKIYSNDYDTNLRRLKIMTNTLVGDVEVIRV

SEQ ID NO: 4567 - protein, 371 aa, Enterococcus faecalis
GDPCMTDRISRRMISLYASLSTFIVILITLFSYFHSIKQNRWLLELLQRKVFYLPLIVHIVLISLLIGLLTFLLISLVQKGQYGRIEEKLRLLANGNYESPVLNKPTTSENQDHYLTEVEQDIWSIKNKLLEMSKELQLLNSRPQLMDGQTKEEILENERHRLARELHDSVSQQLFAAMMMLSALNEQAQRTETPEPYRKQLAMVAEIINASQSEMRALLLHLRPISLEGKSLRKGIEQLLKELQTKIKIELIWDVEDVHLNSSIEDHLFRIVQELLSNTLRHAKAKELEVYLHQVDKNVLLRIVDDGVGFDMKEQSNKAGSYGLNNIRERVVGMGGTVKIISFKGQGTSVEIKVPVIKEETASDQSNVSG

SEQ ID NO: 4568 - protein, 215 aa, Enterococcus faecalis
RRKLQVIKVMLVDDHEMVRLGVSSYLSIQEDIEVVGEAENGKIGYEKALELRPDVILMDLVMEEMDGIDSTKAILKDWPEAKIIIVTSFIDDEKVYPAIEAGAAGYLLKTSTAHEIADAIRATYRGERVLEPEVTHKMMERLTKKQEPVLHEDLTNREHEILMLIAQGKSNQEIADELFITLKTVKTHVSNILAKLDVDDRTQAAIYAFQHGLAK

SEQ ID NO: 4569 - protein, 241 aa, Enterococcus faecalis
EFIYGFVILILTNRQERSEEMKQNFAIIGLGRFGGSICQTLVEAGQEVLAIDSSEDRVNEYMNIATHAVVANAQDEMTLRSLGIRNFDHVVVAIGEDIQASILGTLMVKEMGVPNVLAKAVNEYHARVLDKIGADMVVHPERDMGIRIAHKLVSRNILDYIELSSEFSLAEVRVTNPKFYNKTLAELNFRQRFGLTVVAIRRSKTEVIASPDASEIVRENDNLLVIGDTADVDLLDEKMNG

SEQ ID NO: 4570 - protein, 127 aa, Enterococcus faecalis
ALYSLKALRCATINGDRDVKEEQRMKLEVTPKAQQWFKEETGVQPETGIRFFGKIYGKTPVHDGFSIAMSVEAPDEPMIKENLDGITYFIEETDDWFFKGYDLIVDYDEKNDEPRYQFEANQEDLTK

SEQ ID NO: 4571 - protein, 256 aa, Enterococcus faecalis
  MISC_FEATURE (252)..(252): Amino acid 252 is Xaa wherein Xaa = any amino acid.
LKCGGNKMLSIVVPCYNEEAAIPLFFEEVEKISQKLSHSVEYIFVNDGSKDNTLAVLRQLYREHPEKVRYLSFSRNFGKEAGLYAGLKEATGDLVTVMDVDLQDPPELLPQMIEMIETSTDLDCVGTRRITRDGEPPIRSFFARMFYKLINRIAETEMVDGARDFRVMTRQMVDAILELSEYNRFSKGIFSWVGFKTKYIEFKNRERIAGETSWSFWSLISYSIDGIVNFSETPLNIASYVGAFSCIGSALXMLVI

SEQ ID NO: 4572 - protein, 72 aa, Enterococcus faecalis
KYYVLRGRGYFLNNEDLVLKMILDESGFSQGLNSAVKKLQGFDVEVDRTGQKGGRSLGRIWTIWQVSFNTGL

SEQ ID NO: 4573 - protein, 72 aa, Enterococcus faecalis
TEKKVTELLYHPHFKYTPQYREAELKSSLLENGWTLNEIENTDLNELLKIYAFKDAVDEFENIKYLDENTMF

SEQ ID NO: 4574 - protein, 138 aa, Enterococcus faecalis
QQQIKNNSLGRPCRPILYGGIKMASKFQQKIKLMIKDGSKYTTKQFTSAEFLPGSVMDTGTDLQIRLEEATKTNDMEAIRPILRECYDFIADVIFEKQFTGQEYIDGMDARELLKITAQLLGSVTSGYDAIYSEQKKK

SEQ ID NO: 4575 - protein, 284 aa, Enterococcus faecalis
KIDGKKEKCKCHLCRAPNVVPKDRGNGVFPVYGAPITIGTAVSIKPDVTTETTPDYGDSVVQDQYVAFGGAEVTLETNGYQNEVLAEITGGKKLKGGVLRSADDIASDGAFAYRRRKSNGKYRYTIFYKGKFALTSDETSTLEGSSVSYTHPEWTGSFVDVPGLGYMYSVDEDDEGVDLEMIKNWFTEVMDPRKENTTAVTGVTLDQTELNLKVGQTATLTPTITPDNASNKKYQFRSESEAIGTVTPIQGKVTAVGEGTTEIVVTTEDGNFTAKCTLNVTTAD

SEQ ID NO: 4576 - protein, 128 aa, Enterococcus faecalis
ERIDMYDKILKMLTDTIKQFSDAPIYLDNVMQSSEPFYFVLSVEESMTDNVGQNVQNKAYHVDIALVDSKKDTQLVKSLTESCGAFFNVLNLDGNELFPEDYQTFKTDGIQHINFNVAFPQLIEWSEK

SEQ ID NO: 4577 - protein, 139 aa, Enterococcus faecalis
CYQEVQLMSKSDLRMKSNADKVIANLKKMTPIAEKEGAAMVNDSLAKIYQLIVPMTPIKSGDLRRGYRIIKARKLSSGRIVGALINNEKYFRYVNDGHRTKNGGFVKGRFMLQKSNKLANATYIPKRFKQMAIIIVKKG

SEQ ID NO: 4578 - protein, 129 aa, Enterococcus faecalis
RGVFLLNEAEVLAATYFDTCVIERISDIENVESGITEQVYFPIHDGKLPCAFSQGSMGNLPVIENKEAFKFNISYEEQKLFLEPNIKVKKGDRITITQGTGQKHVLFSKKPFYYPSHIEVVLSGSSIDE

SEQ ID NO: 4579 - protein, 116 aa, Enterococcus faecalis
CFMVDEKKEEIVEKIQLMLPNASEDRILSVLNLVIFEINSYNTCKIDIAWDEFEPLIIEVIYKALKNEIDKSVASVKRGDTSISYVVESKDIQSLMKNYSSAIKRILGCDSGVFFY

SEQ ID NO: 4580 - protein, 66 aa, Enterococcus faecalis
QRRKLKMATAKKEVTYRVLDKKNFVGFMHPKTKKFITANENNEFIVSEDDKEAIEILERAADTFKV

SEQ ID NO: 4581 - protein, 138 aa, Enterococcus faecalis
VRPGHGKKRIDALFKTMFQKGYMGEKLCLVAPDMQELMIDQLDEKSTKIVQFGDKLTFGLQLGNIVSNYGSGIALIEPNLPNGTIAAIDTNYVKLRPLREWRAEELAKTTDSRRIGLVGEYSIEYKASNSGAILNLKA

SEQ ID NO: 4582 - protein, 455 aa, Enterococcus faecalis
PPWWASARLEHTYNETARFAFALHLQSTIERVKEGHVIVHPDLNNVRKNMKKEFQVALDLSSIIEEENNIEIPFDEIGFISMFLSINVGKEERTPENNVGVFVLMHGDSTASSMLKTAQELLGTSIGTAMNMPLTMEVQTMYEQLRNQVITQKESLNNGILLLTDMGSLNSFGNMLFEETGIRTKAITMTSTMIVLEAIRMASVGRSLEDIYQNIQLSFESVVREQFRSSLQKRQNVKKAVIVTCFTGEGVAAKLYQRILPVIDETKVELIQMQFIERETFKKHIDNLMEEYEIKAIAGTVDVEYQNIPFFSVYDIFDDEKLNVLKRIASDEVAIDTIVHSLSGVITSVDSLQKLILMLQKTVHQIQTDMHIIVEPGVDAGIMIHLAFLVDALIKGEETRNFPNLAEYVKTHRLEIDVVRTNFMLIERAYRVTIPEAEVAHVTQMFLENEIKSKQ

SEQ ID NO: 4583 - protein, 110 aa, Enterococcus faecalis
GDEEKMAKKTIMLVCSAGMSTSLLVTKMQKAAEDRGMEADIFAVSASEADTNLENKEVNVLLLGPQVRFMKGQFEQKLQPKGIPLDVINMADYGMMNGEKVLDQAISLMG

SEQ ID NO: 4584 - protein, 482 aa, Enterococcus faecalis
  MISC_FEATURE (464)..(470): Amino acids 464 & 470 are Xaa wherein Xaa = any amino acid.
MDTGGIKMNGLMAWMEKYILPTAAKIGAQKHLVALRDAFIGTLPATMAGSVAVMINAIIRDLPQEFVSTYAASLEADKGIFAVLNVIIGINGFVWNGTLAIAGLIFAFSWGYNLAKAYNVNELAGGIVSLATLISGVAFAPNNTAELAVKVPEKIANAINGAEIGASIANNQLTVNPWGWLNLNHLNGNAFFTVMIMGALSTIIFCKLMQADLTIKMPDSVPPAVSKAFAAILPATIALYVVAIINFTVSKLSGGQLLIDLIQKYIAEPFLGLSQGLGAVLIVTVFVQIFWFFGIHGPNVLAPVLEGIWGQAQLINIDIFQKGYEGKTGTAAVLAAIDDGKAYMWVRGSFDAFAWFGGSGGTIVLIIAILLFSKRADYLTVGKLSLGPGIFNINEPIMFGLPVVLNPIMFIPFVIAPLVATTIGWVATYLGLVAPVSQQVAWVTPPLLLSFLSDRLRLARTNRXVGMLCXHFLELDTVCYRC

SEQ ID NO: 4585 - protein, 135 aa, Enterococcus faecalis
GVGPNRVEEAMSKIEKGGVEGAVKMSKKTIMLVCSAGMSTSLLVTKMQKAAFNQGLDAHIFAASASEAETNLENNPVDVLLLGPQVRYMKSDFEKRLSPKGIPTDVISMSDYGLMNGEKVLEQALGLLAQADKKE

SEQ ID NO: 4586 - protein, 244 aa, Enterococcus faecalis
KGASFIMENIFLKRLEFKAFEEDSVFSKIEGLNKFNSLNFKKPITFFSGENGTGKSTLLEAIAVNWGFNPEGGSINFNFSTKDTHLDLHNYLTVGKSVKRATDGFFLRAESFYNVATYAENIDLDFSEYGDKSLHHQSHGESFLNLVNHRFRGNGLYLLDEPEAALSPQRQLALMISIKKLIDEGSQFIIVSHSPILLAMPDSQIISFDKDSPLEITYEESMPYEITSLFLNNKNRILSHLFAE

SEQ ID NO: 4587 - protein, 84 aa, Enterococcus faecalis
VSFVEKLKLILPPSGLNPQLTAIASNKVDFPVPFSPEKKVIGFLKFSELNLFSPSIFEKTESSSKALNSSLFKKIFSMIKLAPF

SEQ ID NO: 4588 - protein, 449 aa, Enterococcus faecalis
RNAYFIIEVVNMEDLHGRKIIIEETERSIQTKLVYLPTMLERSPLTIQCQRCGEVVSKKENRLATNVYYCHACIQLGRVTSCQKFCHLPERPNSPRTVFFEWSGQLTKGQQAISVELCETAKARENRLVWAVTGAGKTEMLFAVLHQTLQEGGRIALASPRVDVCLELFPRIQAVFPHEAIALLHGNSQESYRYTKLVICTTHQLLKFHQAFDLLIVDEVDSFPFVNNEHLYYGVRNARKKRSSLVYLTATPTKELRKLLQQKKLAASILPARYHRRPLPVPRRFWVQSWQRLSSKNIKIIAHHLKRLLVRNSVLLFCPSISLIHQLHALIAERFSDKEVVAVYGSDELRLEKVQAMRQQKTDILITTTILERGVTFDAVSVIVYGANHRVFTSSTLVQIAGRVDRRQEFNYGEVLFLHDGETRDMKEAIRQIKQMNRLASKRGMLDGL

SEQ ID NO: 4589 - protein, 228 aa, Enterococcus faecalis
MDCKNCASPIRLEITLKMLLRFNKWMSPSLCQHCQAKFQKLPMTGTCFGCSRVSQERYCFDCQRWQLLYPEYSFHNAALFHYDEGMQEWMERYKFQGDYRLRMCFNEEINFYFQQQSADYIIPVPLSEKRMQERGFNQVIGLLEAADVPYSPFLIRKEENVPQSKKTRKERMQLQQPFAIQKENQKKLKKCSVILVDDIYTTGRTLFHAAAVINDCYPKSLNTFTLAR

SEQ ID NO: 4590 - protein, 189 aa, Enterococcus faecalis
MKGVIVMFRYNVRGENIEVTEAIRDYVEKKVGKLERYFSDSPEATVHVNLKVYTEKTAKVEVTIPLPYLVLRAEETSPDLYASIDLVVDKLERQIRKFKTKINRKSRETGRNNTKAAVFLVGEETEETPSELDIVRTKRLSLKPMDSEEAVLQMNMLGHNFFIFEDAETNGTSIVYRRKDGKYGLIETD

SEQ ID NO: 4591 - protein, 292 aa, Enterococcus faecalis
RGGRSLMEKLYDKSLTELHDLLVSKEITAVDLTEETLNRIQDTEEQLGSFITVSEEKAMALAKAIDLKGITESNPLAGIPIGIKDNIVTKDILTTAGSKMLHNFDPIYDATVMDKVYQADMIPVGKLNMDEFAMGGSTETSYFKKTKNAWDQTKVPGGSSGGSASAVAAGQVPVSLGSDTGGSIRQPAAFNGIVGLKPTYGRVSRFGLIAFASSLDQIGPLTRNVKDNALALNAISGYDEKDGTSAGVSVPDFTADLTGDIKGMKIALPKEYLGEGVQPDLREAVLKAPEGS

SEQ ID NO: 4592 - protein, 108 aa, Enterococcus faecalis
MIERRVSMAITEEQVKHVAKLSKLSFSEEELADFTNQLDKIIDMVELLEEVDTTGVPFTSNVNESINVMREDVATPGMDRKELMRNVPESENGYIKVPAIMDNGEAGA

SEQ ID NO: 4593 - protein, 65 aa, Enterococcus faecalis
RSTLAKNPKEKFEILGGKVTGSVSKKTDIVVAGEDAGSKLTKAESLGVTVWNEQEMVDALDASHF

SEQ ID NO: 4594 - protein, 637 aa, Enterococcus faecalis
KDDRSITLMRRSSTMEQQPLTLTAATTRAQELRKQLNQYSHEYYVKDQPSVEDYVYDRLYKELVDIETEFPDLITPDSPTQRVGGKVLSGFEKAPHDIPMYSLNDGFSKEDIFAFDERVRKAIGKPVAYCCELKIDGLAISLRYENGVFVRGATRGDGTVGENITENLRTVRSVPMRLTEPISVEVRGECYMPKQSFVALNEEREENGQDIFANPRNAAAGSLRQLDTKIVAKRNLNTFLYTVADFGPMKAKTQFEALEELSAIGFRTNPERQLCQSIDEVWAYIEEYHEKRSTLPYEIDGIVIKVNEFALQDELGFTVKAPRWAIAYKFPPEEAETVVEDIEWTIGRTGVVTPTAVMAPVRVAGTTVSRASLHNADFIQMKDIRLNDHVIIYKAGDIIPEVAQVLVEKRAADSQPYEMPTHCPICHSELVHLDEEVALRCINPKCPAQIKEGLNHFVSRNAMNIDGLGPRVLAQMYDKGLVKDVADLYFLTEEQLMTLDKIKEKSANNIYTAIQGSKENSVERLIFGLGIRHVGAKAAKILAEHFGDLPTLSRATAEEIVALDSIGETIADSVVTYFENEEVHELMAELEKAQVNLTYKGLRTEQLAEVESPFKDKTVVLTGKLAQYTREEPKRKI

SEQ ID NO: 4595 - protein, 572 aa, Enterococcus faecalis
DRSTRTRGDVFEKKKRMQENEPIAVTANAERYYPEDKQGLTAAQVEERQRKGLVNAAVDTEFITTKQIVINNVFTYFNLIFVVLGVLLMLVQSYKNMTFLPVVIINTVIGIYQEIKSKKVLDSLNILNATKVTVVRDGQEQEISPDELVLDDVVLFKSGEQISGDAIVLSGEVRVNESLLTGESDEITKVADSQLLSGSFIVSGSCYARIDKIGAEAYVHQLTLEAKSIKKGEQSEMVGSINRLVKWVGIMIIPIGCVLFFQSYFINHQGLHDSIVSMEAALIGMIPEGLYLLTTVALAASTMRLAKRGVLLHNMKSIESLARVDVLCVDKTGTITENTMEVQELVPVVSIENDGTDLTNVEKLIGDFCRTMSADNDTMKAMKEFFVTNNQREAVSYTSFSSVEKFSSVTFPEATYILGAPEMILRDNYEMYQSEVEHYTSQGYRLLVFGKYLGEFQETLAAEVQPLGYILLWNPIRKEAKATFEYFAEQNVAIKVISGDNPLTVSNVAQAAGIIGAENYVDARTLTTMEAQTEALEKYTVFGRVPPRTKETICIIVEKIRSYSGDDRGWSQ

SEQ ID NO: 4596 - protein, 278 aa, Enterococcus faecalis
KNTPFLVVSRPEQKKQFVLLLKKLDHTVAMTGDGVNDILAMKEADCSIAMASGNQATAQASQVVLLDSDFSTMPEVVFEGRQVVNNIERSSSLFLVKNIFSLLMSVFAMIFAVTYPLQPTQVTLISLFTIGIPSTFLALEPNHRRIEGKFLFNVLSKAIPGGLTDMLVVGALLICGDILALQKTDISTTATLLLVSVGFMVLYKISSPMNRYRKRVMIGCLIGMVITSISMKNLFSLTSVSPTALLLLAILFFAADSTFQHLSTISEKVQLWFYKKRH

SEQ ID NO: 4597 - protein, 368 aa, Enterococcus faecalis
IKMKKRSFVYWGMFFILLSTLITPFLKLETGYAQTEPTSTSETNQISATPNVVPRKQVGNIVTAIQLTDKEGNPLGTINQYTDIYLRIEFNLPDNTVNSGDTSVITLPEELRLEKNMTFNVVDDTGTVVAIAQTDVANKTVTLTYTDYVENHANISGSLYFTSLIDFENVENESKIPIYVTVEGEKIFAGDLDYQGEGDDVNEKFSKYSWFIEDDPTEIYNVLRINPTGQTYTDLEVEDVLKTESLSYMKDTMKIERGQWTLDGNAIWQFTPEEDITDQLAVQYGPDDRNFSVHFGNIGTNEYRITYKTKIDHLPEKGETFTNYAKLTENQTVVEEVEVSRVSQTGGGEANVNNMLLKFIKKMKQASV

SEQ ID NO: 4598 - protein, 162 aa, Enterococcus faecalis
CEQYVVEIHKEDEAGQRLAGAEFELIRNSTNQTVAKITTDQNGTAIVKGLLKDNYTLVETKAPTGYQLSQNKIPITPEDFGKNLVALKTVVNHKISYQPVAASFLAGKVLLGKPLKDAEFQFELLDEKGTVLETVSNDTLGKIQFSPLTFETPGNYQYTIRE

SEQ ID NO: 4599 - protein, 107 aa, Enterococcus faecalis
DTHNLRVQLTVEALLGNLVAITQYDGGQVFTNHYTPEKPLESTTPPTSGTTDSTTNSTTESTSITIEKQAIRNKELPKTGETKGNAFLFLGSLLLIQGLFIYFKTKK

SEQ ID NO: 4600 - protein, 187 aa, Enterococcus faecalis
LGVSGFLLTLFDGKVIRTRFVTSISKEAKILSSAVETVTKLVTPILEEQNFELVEVEFVKEGKNWFLRVFIDKEGGIDIEECAFVSEKLSEKLDAMDPDPIPQAYFLEVSSPGAERPLKKESDYEQAVGKYIHISLYQAVDGEKQIEGTLVHLDSEQLTLSVKIKTRVKEMTFERKNIAKARLAIQF

SEQ ID NO: 4601 - protein, 306 aa, Enterococcus faecalis
RIHRKKRKTMSKEMLNAFDVLEAEKGIPKDTVIEALQAALVSAYKRHYGQASNVEVEFEPKKGNIHVYAVKEVTEEVFDSQLEVSLKDAVALNGAYEIGDKIRFEVTPKDFGRIAAQTAKQVILQRVREAERTIIYNEFSEYENDIMQGIVERQDRRYIYVNLGKIEAVLSKQDQMPNEFYQPHDRIKVYVSRVENTSKGPQVFVSRSHPDLLKRLFEQEIPEVYDGIVEIVSVAREAGDRSKVAVRSTDPNIDPVGTCVGPKGQRVQAIVNELKGENMDIVEWNEDPAIYISKALESSSSIRCYF

SEQ ID NO: 4602 - protein, 250 aa, Enterococcus faecalis
TKMFKKKKAQTSFREVFKKGDFATKLSFLVMGAANFANKQWLKGIIFLTAEIGFIYWLIRNGFHALMMLGTLGTQQQGLVYDDSLGIEVLKEGDNSMLLLLFGIAAILVCLSLIILYVINLKSARHLYELKTAGKKIPTTMDDLRSLLNERFHATLMTIPLLGVLFFTILPLLYMISIAFTNYDHNHLPPKNLFTWVGLANLGNVITGDMASTFFPVLGWTLIWAVFATATCFFFGIILTLLINNKRLKI

SEQ ID NO: 4603 - protein, 68 aa, Enterococcus faecalis
YILSLLLLISKVKMIPKKKQVAVAKTAQIKVQPSTGKNVEAISPVITLPRFANPTQVKRFFGGRWLWS

SEQ ID NO: 4604 - protein, 196 aa, Enterococcus faecalis
CLKTEGKRDFMGFPENFLWGGATAANQYEGGYLSGGKGLSTLDAITGGSQTEPRRITYLTKEGQKASCTRDQALPEGAIGYIDEELYYPSHVATDFYHHYEEDIALFAEMGFKCFRLSIAWSRICPNGTKEINEEGLAFYDKVFDALLRHGIEPVVTINHFDIPMYLADEYDGWKNREVIDFFVFLIATAFFTTKN

SEQ ID NO: 4605 - protein, 491 aa, Enterococcus faecalis
FADRFNIKRCGGREFMAFRKDFLWGGATAANQCEGGYNEGGRGLANVDLAPTGPDRFPVITGEKKMFNFDEEHFYPAQEAIDMYHRYKEDIALFGEMGFKTYRLSIAWSRIFPMGDETEPNEEGLKFYEDLFKECHKYGIEPLVTITHFDCPMHLVEEYGAWRSRKLVGFYENLCRVIFNRYKGLVKYWLTFNEINMILHAPFMGAGLYFEEGENKEQVKYQAAHHELLASAIATKIAHEVDPENQVGCMLAAGSNYAYTCKPEDVFAARQADRENYFFIDVQSRGEYPAYALKEMARKGIQIEMEEGDEELLKEHTVDFISFSYYSSRVTSTDPEINEQTAGNIFASVKNPYLKASEWGWQIDPLGLRITMNDLYDRYQKPLFIVENGLGAVDTPDENGDVVDDYRIDYLAAHIQAMKDAVEQDGVDLLGYTTWGCIDLVSAGTGEMKKRYGFIYVDRDNEGNGTLKRSKKKSFDWYKKVIATNGEDLSN

SEQ ID NO: 4606 - protein, 670 aa, Enterococcus faecalis
RFTLHELYKQRNNKRTTLDSDIQLAKPSNENKFLEEKKMGKYHELAEKIVKNVGGQENINSLTHCITRLRFKLKDESQANDDVLKNMDGVVTVMKSGGQYQVVIGNHVPAVYEEVVSIAGLSGEREEEASSGNLFDRLIDILSGCFQPFLGALAAAGMVKGLNALLVFLKLYTATSGTYTMLNGIGDAIFYFMPVILGYTAAKKFRLHPMVGIVIGAALCYPTIQGSALQTAFETTAGAGAAAPYNLFGLPAYNTFMGIPWVGANYTSSVVPIIFIIAFAAQVQKVFKRIIPEVVQTFLVPFFVLLIALPIGFLVIGPIVSMLTDLLSAGFTALMSFSPALYGLILGFFWQVLVIFGLHWSVVPLAIMQVTQEGSSQVLTGSFAASFAQTAVVLAMFFKLKDKKLKALCPPAIISGIFGVTEPAIYGITLPKKWPFIYSMIGGAVGGLYLMINNVTAYTMGGLGIFGVLNFINGDDASGMIQSFIAIAIAAVVGFGLTFFFWKDNTVEEEEVIIDKTTIKKENITSPVKGRVLSLKNAEDPAFANGALGNGVVIEPTEGKVVAPFDGTIVTLFPTKHALGLISDNGTELLIHIGIDTVQLEGEGFEAFVKQGDRVKKGQTLVTFDLEGIKKAGFSTQIPIVVTNTADYLDILEVGSNEVSTSDDLLTALI

SEQ ID NO: 4607 - protein, 158 aa, Enterococcus faecalis
  MISC_FEATURE (39)..(39): Amino acid 39 is Xaa wherein Xaa = any amino acid.
RFFPEEYEVGVNALKMVQKRVGMELSTDEARFSPAPPAXPLFLFFSRERKKNRVFFKTPLFAKKKITAPPSRGGVWEKKNPLFSSPPKYFVWRLHQREVVENDDEELYAVIKKKYLNAYRCVEKISLYLNENYDYQVSNEERLYLTIHIARIVQTTEQ

SEQ ID NO: 4608 - protein, 199 aa, Enterococcus faecalis
VRYFVGQLAYIKQNGKWSIGVTTVQKFLDWLERVLTPLAKVIGENKYLVAIRDGFLLSTPLLIVGSVFLLIANFPLPQWDTWMSHLLGKDWATMMSVPASASFDVMTILAVVGIAYSLGKQFNVDAMQAGIIALVSFFIVTPYQTLFTPENSSKVYEVTILPLKWMGSSGLFLRMIVALIATRLFVAIVRKGWTIKMPE

SEQ ID NO: 4609 - protein, 77 aa, Enterococcus faecalis
GVKAASQLSKNMRVTTKKLGIRASKDLTTVGGTHSGIFIVHPLRTMATNKRVAINATIIRKNKPLEPIHFKGKIVTS

SEQ ID NO: 4610 - protein, 274 aa, Enterococcus faecalis
VPPTVVKSFEALIPSFLVVTLMFLLNWLAALTPYGNLQDVIFEFLQTPLLSLGNTLGAMSIAYLFLHFFWFFGINRGSVVGAVFNPVLRALSVENLQAFKDGHEIPNIITGPFQNMCGTFGGAGSTLSLIIVMVLFCKSQRIKKLSQLSLIPGVFGINEPIIFGLPIVLNPILLIPFVLVPAINIIIAYFAMDWGLVPLTNGIQLPWTTPPIISRFLVSGWQGSILQALLLVLGMFIYYPFIRVMDDQYLREEWKPQEEESEEIDFDSFDFDDL

SEQ ID NO: 4611 - protein, 180 aa, Enterococcus faecalis
FINKEEIGMKKILLILNHSLSGFGSDEQAQLKPSGKKAPLGPGVTLLPFLQKQGAEIVATLYCGDQYYLENEEEVAKKFIGFAKKFHADAVLCGPAMHYPNFGEMAARLACKFNAAGIPAIAAMAEENPAVSHYYQQVPIVKMPKKGGIGLNNSFKQMAQLVVAKANGKETKQLEETSCF

SEQ ID NO: 4612 - protein, 827 aa, Enterococcus faecalis
REIQNERMIVFVLDFLLLFSECMFYNREADRWDYVKSTRKIAVRQVVEFILRRGSIDSRHVSEHTPQEGSRLHRMLQKEAGSLYQKEVSLKIEVPLNGHNYCVEGRADGIFVKETGQVVIDEIKTSEPAFEELPPEKVELFWYQAMCYGHMYCQQEQLSEITLQLTYYQTTTKQITRQERHFTEAALAEFFTDLMKRYEQWVIFKEEWRILRNKSLKNLSFPYGEYRKGQRELAVAVYKTILSKQRLFVEAPTGTGKTMSTLFPAMKAIGEEEGERIFYLTAKTITRQVAEDAVKALSEKQAQTKSITLTAKDKICFLTERNCTPEHCPFADGYYDRLNEGLWDLLQHENHLTREVIERYAQKHQLCPFELSLDASLWCDLIIGDYNYLFDPTVYLRRFFEEPQSAEENIFLVDETHNLVNRSREMYSAAISRNAVLQIQKRLQKESVQLKRACQKVLTTFDDIEAICEEKDTDFFAQRAPIDSLVKQIHRLTEVIAEWLPENQHIEELASILSFYFDCLSYLRISEYYDNGFYTSISLRNYDCVVKQFCVDPAYLLSQRLDKGKASILFSASLTPLNYYQEVLGGGEESLRYRIPYPFPEENQLLMIGSHLQTTYKNREKSYPQISELLGKLSETKTGNYLIFFPSYAYMDDVYQVFSQRYPQVKTQIQGTDLNEKEREAFLAEFKENPQETFIGFCVLGGIFSEGIDLKGTRLIGTIIVSVGLPQMNPEQELIRTFYQEERGQGFQFAYQIPGMNKVLQAAGRVIRDAQDKGFVLLLDERFELPSVQRFFPPHWLAHRKANTNEQLIQQVKQFWLKNKENKGGNK

SEQ ID NO: 4613 - protein, 333 aa, Enterococcus faecalis
RKQRRKQMKTILVLHTGGTISMSKVAGGSVAPNEKNPLMEQEALFSGKVHLVVEDIFNIPSPHMTLERMFQLKERIQKAYSEPIDGVVITHGTDTLEETAYFLDITLEKKIPIVLTGAMRSSNEIGSDGLYNFISAIWTACSDESYDKGVLVVMNDEIHTARYVTKTHTTNVATFRTPTFGPIGTIAKERAFFAKEVLPQEVCDVSSVKGNVHVVKAYAGMGERMFELLNTPETDGLVIEALGAGNLPPETLPALQKMLDNGIPVVLVSRCSNGIAEDIYDYAGGGVGLKKMGVVFARGLNGPKARIRLIVGLNSEKNPAELKEFLEHSLHHG

SEQ ID NO: 4614 - protein, 202 aa, Enterococcus faecalis
IQGGSTYMDIKVQKTEDLIPYEKNPRHNEDAITAVAKSIEKFGFKVPIVVDASNVIVNGHTRLKAAKYLGLKEVPTIIADDLTPEQIKAFRLADNKVGEIATWDEELLNAELDELADLDFDMTEFGFDLPDIEGEEVEVIEDEFEEELPAEPISKLGDIYQLGRHRLMCGDSTNSLEVEKLMGNKKADLLITDPPYNVAYEG

SEQ ID NO: 4615 - protein, 66 aa, Enterococcus faecalis
YLSAYKGSRQMLNIGSNPIWSIVNFSDSQNKKCMSINVSFSQASLYCSISLLHVSMAKWQRSSLQN

SEQ ID NO: 4616 - protein, 142 aa, Enterococcus faecalis
KMQLFPDIDDKKTKQNARNLLKKYRRLQRIAGAPQFNITSPIIKEVPIQHTNTHRSQQHFIRKIDAEKEKLKIDNALARLSLINRQLLYYTYCSIEKKTNVWIASELGYSVSNVETLKCVALLEFAEAYESGLLQCYKSAID

SEQ ID NO: 4617 - protein, 66 aa, Enterococcus faecalis
MEKSKSLIIWLATGGTMKFEDVRNFETVTNNLDWDVLKFNYLGVSTGVRRNAVFEIVKLMGWALEE

SEQ ID NO: 4618 - protein, 130 aa, Enterococcus faecalis
SCLATKSRKQPLYAVKGLTDYFRYDNKVILFNDKQEVLEIANKIGECCGIEEFNYINDLNFILISDLRNDEQTDEKEPLYYVKLPEIGYMRFGFCIPITENIEEAKKYTEQEIKAIDERYWPFAVKVEGE

SEQ ID NO: 4619 - protein, 131 aa, Enterococcus faecalis
RRLDLGGTAMNVQELIEELECLEVATDSLDFLKGANFATERAINLAKQLNEPEKPTVKQFVADWFEDNFEELDWELGGVLINAFNTNRNERSDFQDWLVDTTNYPIETLIRMKLFGYEVEKAAALCSERTY

SEQ ID NO: 4620 - protein, 92 aa, Enterococcus faecalis
MKFYEIKDPYYALIAANDEKQCLKLYKDIVCKVEDEKEFFDDMKTIDKYEAFKMLAKSRIEDGGELGAEEAFNQLENLEENGEVLLIDGGLI

SEQ ID NO: 4621 - protein, 76 aa, Enterococcus faecalis
GGKRKMTLAQLIELVEYGTDIEVVKWLDKNKYLDVITVDENTLFENNADFNCLVSSISPWDAWTIHVELSLDKEEK

SEQ ID NO: 4622 - protein, 128 aa, Enterococcus faecalis
RKSEKNSGYFRGGTTMKNYDPNIRWGIHTVKVSFQQWDYKGYVTFVKSGNCKGLNVLDIDADDLYDMKFKENPINFVWFGTDDDGEDWFTMILKNNEDELSVEDEWDCLKDYIVGVEIIDFVEEENEK

SEQ ID NO: 4623 - protein, 88 aa, Enterococcus faecalis
MAYEKLRLVTASVSGDIYLSKTKDGLMDVNSRRVITDEAIQAVTDWFYVNKRKTVQFKGIDGKEHSLFYTSDKEKAKKILAILEEEQQ

SEQ ID NO: 4624 - protein, 125 aa, Enterococcus faecalis
PRIIGGGGMSKLNQLIGFLEEQLTVSEPTPDYTRHNQEIITYIEYLKSMKQPQLNENQQIVLDWLKDRFNETEIKASCTGYLWKLHQSYIDDEADEAGIAYEELSYEEEAEMVRVFAEWFEQERK

SEQ ID NO: 4625 - protein, 84 aa, Enterococcus faecalis
KTRTAFEIFESDLVKVIDGESEEDSYISVVKNYSNEGYPAFDIEYPPNYHYDRNVLSAIMCNGFETIEVTGNVYDNPELLEVAE

SEQ ID NO: 4626 - protein, 296 aa, Enterococcus faecalis
LESRREKMTKKFVLAPDSFKESMSAKEACLAMEKGILAVFKDADIQHVPMADGGEGTVDSLVDATGGTRVPVRVAGPLPDQIVETYYGLLGDQETVVIEMAKANGIELVKAAERNPLITSTYGTGEMIQHALNHGAKKIIIGIGGSVTNDGGAGMIQALGARLLDKEGQELTRGGGALDKLAQIDLTQFDQRIFATEVLVASDVNNPLTGPTGASHVFGPQKGATEEMVAQLDKNLAHYAAIIKKEIGIDVEMMPGAGAAGGLGAGLLAFTKAQLRPGIDIVVEVNQLGHLHHEWD

SEQ ID NO: 4627 - protein, 430 aa, Enterococcus faecalis
MPDITISWVAAILGLVVAIVLILKIFNPVYSLFFGAIVGCLIGGASLSDTVAVLLNGTQSIMGTAIRVLAAGMLAGVMMESGAAESIANAIVQKLGEKKAILSLALSTMVITAVGVFIPVAVLIVAPIALSVGKSTGISKLSLLIALSGGGKAGNIISPNPNTIAAANGFDLPLSDVMIAGFIPAVFGLITAVVLANIMRNKGSMVKETDLVEEQTKELLPLKKALIAPVLAIVLLLLNPIGAVLNISFIKSLNIDALYILPFASVVGTIAIGQTKQLAFYASSGLKRVTDTVLILIGAGAIAGLISVSDLSTQIVHLISVMGISGTFLAPISGILMGLAVGSTSTAVILATGSFGPAILDMGTSSLSAAVMVHTGATVIDSVPQGNYFHITAQSMNMTIKERIRVIPYEMCVRGVMTIVATILYGFILN

SEQ ID NO: 4628 - protein, 217 aa, Enterococcus faecalis
SVAGLILILLVGYRLYLEYQTDIQLFLNPKASKTQLLERIRSHGFSAALLLVFLTAIMCAVPGIPTSVIGVIAGLSFGPFSGTLINVLGNSMGNLVAIFLMHHIKFLDKKTETNHWVQSIRRMKHPKIGIMVGYMIPIIPSSVINFAADTMQLPLKNLIAAIFIGVIPSSILYACGGEALFHGYNKTAVLLIVSVLLFVGLVVIIEKDRKRFQKTVL

SEQ ID NO: 4629 - protein, 78 aa, Enterococcus faecalis
CIKKIATKFPILFPKTLMSVPLKGPKLNPAITPITEVGIPGTAHMIAVKKTNNSAAEKPCERIRSNNCVLLALGFKNN

SEQ ID NO: 4630 - protein, 359 aa, Enterococcus faecalis
NEKITVTFYWNYRYYCHLVFWRAPIGESKWHGGAEQHTLTIYNWGDYIDPALIKKFEKETGYKVNYETFDSNENMYTKIQPGGTAYDIAIPSEYMIQIMMKAKMLLPLDHSKLKGLENIDARFLDQSFDPKNKFSVPYFWGTLGIIYNDKFIDGRQIQHWDDLWRPELKNNVMLIDGAREVLGLSLNSLGYSLNSKNDQQLRQATDKLNRLTNNVKAIVADEIKMYMANEESAVAVTFSGEAAEMLENNEHLHYVIPSEGSNLWFDNIVMPKTAKNKEGAYAFMNFMLRPENAAQNAEYIGYSTPNKEAKKLLPKEVAEDKQFYPDDETIKHLEVYQDLGQEYLGIYNDLFLEFKMYRK

SEQ ID NO: 4631 - protein, 230 aa, Enterococcus faecalis
LSDVFEDTRLLTIVLNTFLLAFLSALIATIIGTFGAMGIYYTKRRKNRNTLLSFNNILLVSPDVIIGASFLIFFTAVGFISLGFTSVLLSHIAFSIPIVVLMVLPKLQEMNDSMVDAARDLGANNVQVIKNIILPFLAPGIIAGYFMAFTYSLDDFAVTFFVTGNGFSTLSVEIYSRARQGISLEINALSALVFLFSMILVVGYYFISKDNTPKRLKKMRREQSEVAKLK

SEQ ID NO: 4632 - protein, 96 aa, Enterococcus faecalis
  MISC_FEATURE (24)..(24): Amino acid 24 is Xaa wherein Xaa = any amino acid.
YFPPTPGGGIKTTVGLTPLHPKKXPGGGREEEERAWQIMQKKKFKWSYVYLFVVLALLYAPFFYLIFYSFNDTQTMNQFTGFTLDNYRTFSKTHAC

SEQ ID NO: 4633 - protein, 181 aa, Enterococcus faecalis
TAGYYLSMTMNSVWYAFLITIFTLLVSYPTAYFLTKLKHKQLWLMLVILPTWVNLLLKAYAFIGIFSIHGSINQFMSFMGLGTHQILFTDFSFLFVATYIEIPFMIMPIFNALEEMNPSLISASRDLGASSAETFRRVIFPLSLNGVKSGVQAVFIPSLSLFMLTRLIGGNRVITGGPGKK

SEQ ID NO: 4634 - protein, 66 aa, Enterococcus faecalis
QKQRGKAMNDFQFISANETYRNLYYQLPFTSEFYKNMSNDTKKTYAMLPERREYSFQNNRIDREGH

SEQ ID NO: 4635 - protein, 118 aa, Enterococcus faecalis
MSNNRGKSAAERLLGAGKEDTNPTKATTSNEKELKTTHEHIVMNKKNIEKLIKQQGNSKRNADSIRINPILANALKYWTSIGEPEKSKPDVIEETLLKSIPEEYLIKGYEMAKKQNKI

SEQ ID NO: 4636 - protein, 268 aa, Enterococcus faecalis
HHKEDIIMARIISVANQKGGVSKTTTSINLGAALHFTFNKSVFVIDMDPPEGNATDNFGLDIDGTNVPTIYEVLKDEASITEAILNYKGIDVIPADIALSSAEREFTQVGSEHRLKRVLQPIEENYDYIIIDCPPSLGILTVNAFTVSDEIIIPVEAAYFSLKGLVKLNETIETVKEYTNERLIIRGVLFTKYNERFNISKEMNKTANQISDALNVNIFDTYIRRTITVDEAQAAGSDLISFNKTSTAEDDYIQFTKEFLEKVGDLNE

SEQ ID NO: 4637 - protein, 64 aa, Enterococcus faecalis
SNYNNIVLLQYHVATISLYREVTILCNCNIVILINHNSMTPRLNNIVILINYDIAILQYSDIVI

SEQ ID NO: 4638 - protein, 106 aa, Enterococcus faecalis
PKKGNLPTMPRKTFVYPHPINAYIIKQLGITVEEFCELHAFSQGTVSSWITRNKKIETLPISFIYSLSLSASQTMDQVYSDLLKLQDDYLLHLERHRRTKKIIDEE

SEQ ID NO: 4639 - protein, 70 aa, Enterococcus faecalis
MSILAIGGFVMKAYDYNGTIIPLGDSVRQVAYVECSCGCLASRVTSDSNKYKCSWCKRVYTLRKDHITAR

SEQ ID NO: 4640 - protein, 151 aa, Enterococcus faecalis
SADTCFFTDGRRHSNFTSKPCWWPCRWNCWLRYNQMKQNRKEFSSYFSRSIKQNKPLYLLLMSSETNPFPRPVIGTFRGYAEENKIIIGEDSYSIEEIDFVCMYRHSSRIKQEERVNSNPFQGLVSPTLSKKEQKKLDEYFSDWGFRNEGI

SEQ ID NO: 4641 - protein, 439 aa, Enterococcus faecalis
SFDYTKEPSRDVLCIDVKSFYASVECVERGLDPLKTMLVVMSNSENSGGLVLAASPMAKKVLGISNVTRKNEVPDHPNLIIVSPRMKLYMKKNQEINNLYKRFVSDEDHSVFSVDESFLDVTASLTYFKCDTAYKLAKIIQRVIYNHMGLYVTIGIGENPLLAKLALDNEAKNAPGFVAEWRYEDVPKKVWPISPLTEFCGIGNRMATRLKKLGIRSIYDLAHIEPYMLKERFGIMGLQLYAHSWGVDRSFLGQKAGRPIEKSFGNSQVLPKDYANKEQIKLVLKELSDQVASRLRMASCQTTCVSLFVGYSKGQTDKYGQNGWRKQMKVEPSNNTKVLTEHVLRLFEENYAPGVDVRNLGVSYGRLVWNKNLQLDLFSVPEEQIHETDMYFLIDKIRQKFGFKALIHASSLMEGATAISRASLVGGHAGGTVGLGTTK

SEQ ID NO: 4642 - protein, 259 aa, Enterococcus faecalis
LTCGEATVLYLRKQRPGGTRHILTQVMEEIEDIFLGMGYQVVEGYEVESDHYNFERMNLPKDHPARDMQDTFYISDEMLIRTHTSPVQARTMEKHDFSKGALRMISPGKVFRRDTDDATHSHQFHQIEGLVVDKNVTMGDLKGTLEVMMKKMFGEDRKIRLRPSYFPFTEPSVEVDVSCFKCGGAGCNVCKHTGWIEILGAGMVHPDVLQMSGIDPTEYSGFAFGLGPDRVAMLRYGVNDIRNFYQNDLRFLNQFKVKE

SEQ ID NO: 4643 - protein, 808 aa, Enterococcus faecalis
KMLVSYKWLNEYVNLSNVTPQELADKMSVTGIEVEGVAVPEEGLKKIVVGEVKECVPHPNSDHLSICQVDIGEEELSQIVCGAPNVKAGIKVIVALPGSRIAGNQKIKKGKMRGEVSNGMICSLEELGYSDNVVPKAYAEGIYYLPQEAVNGTPVFPYLDMDDAIIELSITPNRADALSMRGVAYEVGAIYRQTPQFNDPELKEDASDNVENYVTVTVEDSQDAPAYQIRVIKDVTIAESPQWLQNRLMNEGIRPINNVVDVTNYILLLFGQPLHAFDYQKLDSKEILVRRATATEELITLDGETRQLTEENIVITNGKTPVGLAGVMGGANSEISQETTTVALEAALFNPLSIRKTSKQFNLRSESSSRFEKGINQATVGLACDVAAAMIAELANGTVVSGTAVGSEVAVKEAQVAVTLERINQYLGTALDEATVNEIFEALGFAYEVNQGAYEITIPPRRWDIAIEADIIEEPARIYGFDHLPSTLPSGETVAGSLTKAQHVTRQLKSLLEGHGTSEAISYALTTEEKSRQFMMKESQTTRLQWPMSEERSVLRMNLISGLLDDVAYNVARKNNNIAFYEVGRVFYQTEDPTKNLPTEENHLALALTGNTMVKDWQTKATAVDFYTVKGLVESIVAVLGLTEKISYQATTAIPEMHPGRTAWIYLEGEVVGFVGQVHPTTAKAYDIPETYVAELNLQQLVAIEAGGVTYEAVSKFPAVSRDIALLVDETVTNQELVKTISDNAGKYLKEIHLFDVYQGEKLGAGKKSMAYSLTFVNAEATLVDEEINRSMEKVEKALIEKHQVEVR

SEQ ID NO: 4644 - protein, 227 aa, Enterococcus faecalis
QIGGKQMPFSEEMRQLLTANNFQFLFNGLKLTLYISFVSIILSTIFGTILAVLRNQTHGPLKLLASIYVEVVRNIPNLLWIYVIFLIFKIKSTPAGIVSFTVFTTAALAEIIRGGLNGVDKGQIEAARSQCFSNWQILYHIVLPQAIRNVLPAIVSQFVTVIKDTSFLYSVIALQELFGKSYILMGRYAQTGQVFTIYGIVALIYFIINFSISQFSRWLSRNWAKSY

SEQ ID NO: 4645 - protein, 252 aa, Enterococcus faecalis
SFLRLEESKILGGIFMFLLANISWLEEGPFALYRWEALFQDWRIFGQAFLYTILLSLGAILVAFALGIFFGSLSATKSKLLHAISRVYVEFFQNTPLLIQFIVVYYGFPLLSPLLSFSITTIAILCVGLYHGAYISEMVRSRIGAVPTGQFEAAYSQGLTYGQTMRYVILPQAWRIMLPPLTNQVVNLIKNTSTVAIISGADVMFAANSWSSVNLNYIPAFALAGFLYFILCFPLANLARKMEEKNKKAYSR

SEQ ID NO: 4646 - protein, 276 aa, Enterococcus faecalis
TMKKQNKWLAGLSLLVLAGIIVGCGSGNNDSTSKSASSNKTVTVEQLKKAGKIKVGVKEDIPNFGYMNPDTNKNEGMEPDIARLIAKEITGSEENVEFVGVTAKTRGPLLDNGELDMVIATFTITDERKKTYNFTTPYYTDEIGFLVRKEDNFSSMKDLDGKTIGVAQSATTKENLEKKAQEEGIKFTYQELGSYPELKTALTSKRIDAFSVDKSILSGYVDGKTEILKDGFSPQEYGITTKKANTELNDYLNGLIEKWEKDGTLEKIYQDWGLKN

SEQ ID NO: 4647 - protein, 78 aa, Enterococcus faecalis
ALDPEMIQEVLDVMVDLSKQNITMVCVTHEMGFARQVADRVIFMDQGQIIEQGTPEHFFTSTENPRAKEFLSKIIHNG

SEQ ID NO: 4648 - protein, 97 aa, Enterococcus faecalis
IQKERKCLMAKKSKIAKAKKQQAMIAKYAPIRQALKEAGDYEGLSKLPKDAHPSRLKLRDQTDGRPRGYMRKFGMSRIRFRELAHQGLIPGVKKASW

SEQ ID NO: 4649 - protein, 69 aa, Enterococcus faecalis
PRSPLYLLYAIKKIKLEDGTMRQTITLACAETGERLYLTSKNKRNTPEKLQLKKYSPKLRRRALFTEVK

SEQ ID NO: 4650 - protein, 329 aa, Enterococcus faecalis
QEENLMGIPITIVSGFLGAGKTTLINHALAQSPFPKEEIIIIENEFGQTGVDHALLLQTTERIIQLNNGCMCCSLRRDLLASLSAILEVYQEEQQPIAQVILETTGIADPQPIIQTILTTPHIKNHFYIDSLLTVVDGHHWQQQLQEAEAIKQLALADRLFFSVKEPADSTQLPTFQETLRTINPFADILSFQANEPLLASDFFQLNKFTATLTEHEMTHSPHEHAHEHHHHTFHSLTLTASSAINEPLFTRWLDWLMYTHQEKLYRFKGILALQEHDLAIAMQGVNQQAAFQMTNQPPQETTIVLIGKELETKKIQETFQTLNKIATP

SEQ ID NO: 4651 - protein, 515 aa, Enterococcus faecalis
RSTPMKKFTLPLLAALSLILFGACGKTNTSDKTADGKEKLSIVTTFYPMYDFTKNIVGDEGDVKLLIPAGSEPHDYEPSAKDMATIHDADVFVYHNENMESWVPKAAKGWKKGAPNVIKGTENMVLLPGSDEDGHDHDHEHGEEGHHHELDPHTWVSPHRAIQEVTNIKEQLVKLYPKKAKTFETNAEKYLTKLTALDKEFQTALKDAKQKSFVTQHAAFGYLALDYGLKQVPIAGLTPEQEPTAGRLAELKKYVTDNQIRYIYFEKNANDKIAKTLADEANVQLEVLNPLESLTQKQMDNGEDYLSVMKENLTALKKTTDTAGKEVQPETSEKTEKTVANGYFKDSEVAERTLTDYAGNWQSVYPLLKDGTLDQVFDYKAKLKKDKTPAEYKTYYDAGYQTDVDHINITDSTIEFLVNGKPQKFTYKAAGYKILNYAKGNRGVRFLFETDDANAGRFKYVQFSDHNIAPTKAAHFHIFFGGDSQESLFNEMDNWPTYYPSDLSKQEIAQEMIAH

SEQ ID NO: 4652 - protein, 308 aa, Enterococcus faecalis
HRLEEFTEWSFVRSGRKLGHQMCFLQNLLIRHSYCHPEGKDSVRGRLVFTEDEQPMVAHIWGDKPEFFREMSIGVAEMGFQGLDINMGCPVPNVAERGKGSGLILRPEVAAELIDAAKAGGLPVSVKTRIGFTEMAEMEAWITHLLEQDIANLSIHLRTRKEMSKVDAHWEVIPQIMAIRDRVAPQTTITINGDIPDRQKGLELAEQYGVDGIMIGRGIFKNPYAFEKEPKTHTPQELLGLLRLQLDLQDKYAELVPRSIVGLHRFFKIYVKGFPGASDLRAQLMNTKSTDEVRQLLATFETEHGVLD

SEQ ID NO: 4653 - protein, 62 aa, Enterococcus faecalis
SWKIRKNSGTGLYEGDQEFLGKIAKAFFVLAPVGRIHGVVFRQVGKEVGAPDVFFTEFINSA

SEQ ID NO: 4654 - protein, 285 aa, Enterococcus faecalis
PSSGWLSSHFTSYCLLITFRKDDLSMNANVYQHFRKDEHPFIDTVGDWLEQVEMQYAPYLTDFLDPRQAYILETLIRQNSDLSFTFYGGYEQAERKRCLIYPAYYIPEETDFGVVLFEIIYPSKFATLSHGKILGTLMNVGVRREAFGDIISDGDKWQVFIAQEVAGFVVNQVDKIGKITVRLEERDYTQILIPKDGWQEERTTMSSLRLDSVISAVFNISRQRSKQLIESGKVKVNWTETTRPDFALDLLDIVSIRGFGRLQIQELEGKTKKEKFRVLLGVLRK

SEQ ID NO: 4655 - protein, 92 aa, Enterococcus faecalis
GGVIIATLITLLYKGVQIYSGLLVIYALLSWFPGAYDSAFGRLLSRICEPYLSLFDRLNLRIGMVGFNVMVGIIVLNLAAGGLAVILRAIVY

SEQ ID NO: 4656 - protein, 244 aa, Enterococcus faecalis
VTISQSQLKKVQLLYESEQRYSEMRKGEEFMSIFNKDALSSFFGLSGEEDDYYDNYEEYEERKAVNEPPRRAARPKPQRPVQQQESYSQPAYTQQSEPVVEKPSARYRSAEAHQERDTQQAAYTEKKVVSMRSSNQSATTNTRRAQESTANAKTHKITIIEPRVYSEAMSIAKHLFAEEAVLVNFTLVEEDQARRIVDFLTGTVYALDGDIQRVGNEIFLCTPANMEIDSATAQSLANKQFFDF

SEQ ID NO: 4657 - protein, 241 aa, Enterococcus faecalis
VRHHFSAENDKEHRLEMIAENLTNINNQLQLACKSSQRSVADVTMIGVTKSVGIEEAAELVQLGVQNLAENRVDKLLEKKAGLEKFNDIQWHLIGNLQRRKVKLIINEIDYFHALDSLSLAKEIQKRATKVIRCFVEVNITGEESKHGFRKEDVLPFIQELADLDKIQIVGLMTMAPFGASEEVLHATFRELKELQMTVNEKHLSFAPCTELSMGMSNDFPIAVEEGATFIRIGTALFRDA

SEQ ID NO: 4658 - protein, 435 aa, Enterococcus faecalis
KSDRQNQRLLLEHFRLITQTGGYDIMEFSLDNNINNGAVIKVIGVGGGGGNAVNRMIEENVKGVEFITANTDVQALKHSKAETVIQLGPKYTRGLGAGSQPEVGQKAAEESEQVISESLQGADMIFITAGMGGGTGTGAAPVVAKIAKELGALTVGVVTRPFSFEGPKRGRFAAEGIALLKENVDTLLIISNNRLLEVVDKKTPMLEAFREADNVLRQGVQGISDLITAPGYVNLDFADVKTVMENQGTALMGIGVASGEERVIEATKKAISSPLLETSIDGAEQVLLNITGGLDMTLFEAQDASDIVTNAASGDVNIILGTSINEDLGDEIRVTVIATGIDESKKDRKPHRQTRQAVQPMQQTTQSVEMDQPKSQEEASAFGDWDIRREQNTRPKVDESSLEQVDKKEFDTFHREEPNHNDDELSTPPFFRRKR

SEQ ID NO: 4659 - protein, 65 aa, Enterococcus faecalis
SLQVLMNQKRIENRTVKQDKRFNQCNKQLNLWKWINQNHKKKQVLLAIGIFAENKIHVQKLMNLH

SEQ ID NO: 4660 - protein, 451 aa, Enterococcus faecalis
ILELIGGGIPFMAKTGMYVGLDIGTTSVKVVVAEYIEGQMNIIGVGNAKSDGLNRGIVVDIDQTVQAIQRAVRQAEEKAGIQIKSVNVGLPANLLEVESCQGMIAVSSESKEITDEDVRNVASAALVRSTPPERQIVAILPQDFTVDGFEGIKDPRGMLGVRMEMFGVVYTGPKTIIHNIRKCVEKAGLGINELVITPLALTETILTDGEKDFGTIVIDMGGGQTTTSVIHDKQLKFTHVNQEGGEFITKDISIVLNTSFNNAEALKINYGDAYPERTSANEEFPVDVIGKSEPVRVDERYLSEIIEARVEQILRKSKEVLDEIDAFELPGGVVLTGGAASMPGIVDLAQEIFEANVKLYVPNHMGLRNPVFANVISIVEYSAQLNDIYHIAKYAIPGEKSKPAQSVAVQQEVRYDTYAEQPQEEYEEFNERESGEKVTGKIKDFFSNIFD

SEQ ID NO: 4661 - protein, 72 aa, Enterococcus faecalis
RSKWTNLESLIWKSAFFLIRMKKESEETGSEVSEDSAVENQEVVDPNAGVATDEANNGTPTNGENQEVQQAE

SEQ ID NO: 4662 - protein, 318 aa, Enterococcus faecalis
IILKRTGILLVNLGTPKDSSKTEVRKYLKTFLSDRRVIKIHPIIWKPILNGIILNIRPKKSAKLYQKICTENGFPLLEYTEKQMENLKNICPEVEVTIGMSYSEPSIETALDTLLSKEIEELNVIPMYPQYSGTTVGSVFDSVMNYFIKSDRIVDIKFIRSFYNNPQYIDYFSKKINEALNESPIDAIVFSYHGIPMSYVKDGDNYPKECTKTTKLIMDKLGDIRYYQTYQSKFGPSEWLKPATDDTLKKLPSKGIKNILIVAPGFVVDCLETIEELEHENRNYFLENGGEVYKYVHPFNGDIEFTKLVKDNCLTTGK

SEQ ID NO: 4663 - protein, 82 aa, Enterococcus faecalis
MLKAKGDHHMGFGKWKEIIPSDKSKQFEEGQKVSFIYRKEIRSGIIAVLLINSAVINIIDSSKPKNKKEKTVISYEKLLSMY

SEQ ID NO: 4664 - protein, 92 aa, Enterococcus faecalis
DYNSPFAYQTFFATNRIQGMHKEETYMNNGTVKWFNSDKGFGFITGEDGNDVFAHFSAIQADGFKSLEEGQAVTFDIEEGQRGMQAVNIFKA

SEQ ID NO: 4665 - protein, 339 aa, Enterococcus faecalis
  MISC_FEATURE (7)..(7): Amino acid 7 is Xaa wherein Xaa = any amino acid.
IPRSVAXTHTYVWWQNVLTYENAKQVLDYFLPKVQTPKGSIVALDAEDGVQSTDVTLWALDYIKEAGYTPMLYGYKGYLTSSYDLSRIAKKYQLWMAEYPDYEVTPYPNYNYFPSFENIGIFQFTSTYVAGGLDGNVDLTGITDNGYTKNNQPATNTPAIEEGKEVENTPSSDVKVGDTVKVKFSVDAWATGEAIPQWVKGNSYKVQEVTESRVLLEGILSWISKGNIELLPDAATVPDKQPEATHVVQYGETLSSIAYQYGTNYQRLAALNGLTNPNLIYPGQILKVNGSVVSNIYTVQYGDNLSSIAAKLGTTYQTLAALNGLANPNLIYSGQTLSY

SEQ ID NO: 4666 - protein, 373 aa, Enterococcus faecalis
HGKTTLTAAIATVLSKHGGGEAQSYDSIDNAPEEKERGITINTSHIEYETETRHYAHVDCPGHADYVKNMITGAAQMDGAILVVSAADGPMPQTREHILLSRNVGVPYIVVFLNKMDMVDDEELLELVEMEVRDLLSEYDFPGDDVPVIAGSALKALEGDESYEEKILELMAAVDEYIPTPERDTDKPFMMPVEDVFSITGRGTVATGRVERGEVRVGDEVEIVGIKDETSKTTVTGVEMFRKLLDYAEAGDNIGALLRGVAREDIERGQVLAKPATITPHTKFKAEVYVLSKEEGGRHTPFFTNYRPQFYFRTTDVTGVVELPEGTEMVMPGDNVAMDVELIHPIAIEDGTRFSIREGGRTVGSGVVTEIVK

SEQ ID NO: 4667 - protein, 225 aa, Enterococcus faecalis
KISQLAVLADLFLQYTWRKRLGDLMEKVLTIAGSDSTGGAGIQADLKTFEEYGVFGFSSLTSIVTMDPTTGWSHEVTELPETLLEKQLISVFAGGPVAALKTGMMGNEQNIKMASKYIKQEKIQKVVIDPVIACKGTAQILQPKSVEGLKNDLLPLALVATPNLIEAGILSGLGEISSVAEMEEAAKRIVQMGAKHVVVKGGHRLAGEKALDLFYEWSHRASFGK

SEQ ID NO: 4668 - protein, 93 aa, Enterococcus faecalis
LVKKHWTCFTSGHTAHLLENELYPTDYNHGAGCTFSAAITAGLAKGYSVLKAVTLAKKFVTAAIKHGIQVNPYVGHVWHGAYTHAEQRMRKKA

SEQ ID NO: 4669 - protein, 441 aa, Enterococcus faecalis
NRTVIAKKEAEHRRGDNFSVLQFRTDCGVCFDELPESDFFLFWLQMVFNGGNAMLEKETYSQLFKWSFSKKTQVTYWDGTVKEYGQGSGDPVFKIVFNEKIPVKDLLNNASLTLGEAYMDRKIEIEGDIQALIYDVYNQKDSFLHNAKFIKWLPKESHSKKRSQEDIHSHYDLGNDFYKKWLDQTMTYSCAYFKTPEDTLEQAQVNKVHHILDKLFIKEGDTLLDIGCGWGTLILTAVKEYGAKATGITLSEEQFHHIRHIIEKEDLQDRMTVKLMDYRDLKGESFDHITSVGMFEHVGAENLHEYFDVVQRNLAPKGTALIHGISRQQGGAKNAWINRYIFPGGYIPGVTELVGHMTENDLQVIDLESLRRDYQLTLEHWTKNFHNIEAEIVDEKGERFYRMWDLYLQACAASFQASNIDVIQYLLVHPDNNDIPMRRIG

SEQ ID NO: 4670 - protein, 296 aa, Enterococcus faecalis
LFNEINFLRSWTQIGIHNNDKQSKYQAAHHLFVASAKAVELGHSINPDFQIGMMVAYIPSYPLSCKPEDVIAAVQFNREQEFYMDVQAKGYYPAHKLKEFEREGMTIQMESDDLAIIQKGTVDYIGFSYYMSTVSTAYPEEVKYVGGNQMPAVKNPYLQESEWGWAVDPLGLRISLCQLSDRYNMPLFVVENGFGAVDTLQEDGSIVDDYRIDYFKQHIEAMRTAIEEDGVNLIGYTPWGCIDLVSAGTGEMKKRYGFIYVDMDDQGQGTLKRTKKKSFNWYKQVIASSLFPTDWV

SEQ ID NO: 4671 - protein, 344 aa, Enterococcus faecalis
VHPRGQAFLEAVVAVTASYLFPVKIVLEAAQEAQAAPTQLSDVLSNVLTSVVQNPIQAMIEGNYLSVLFWSSLIGIGLRQSSVATKDVIANLSTGITTVVQMIIGIAPIGILGLVFHSVATTGIAGLAKYGQLLLLLIGTMAVVALVVYPAIVFWNIRQNPYPLVFFVLKESAIPAFFTRSSAANIPINMELAKAMDLNEESYAVSIPLGATINMGGAAITITIMTLAAVHTLGMSVPIYLALLLSIIAAVSACGASGIAGGSLLLIPLACSLFGISNDIAMQVVGVGFIVGVVQDSIETALNSSSDLLFTTSVELADRRKNGEIIDVKALIGKSQLVVEQENI

SEQ ID NO: 4672 - protein, 95 aa, Enterococcus faecalis
LLPINALTSIISPFLRRSANSTEVVNNKSLEEFNAVSMESWTTPTIKPTPTTCMAMSLEMPNKLHASGINNKEPPAIPEAPQAETAAMMLNNNAK

SEQ ID NO: 4673 - protein, 854 aa, Enterococcus faecalis
  MISC_FEATURE (211)..(211): Amino acid 211 is Xaa wherein Xaa = any amino acid.
EVHEMKWYQLSSTKVIEQTKTKQTGLSSEERQQRLQTNGPNKIEEKQQLKTWQKLAKHFTDLLMVVLLAAAILKFATGEVVEGSIIFLVVLVNGFVGYWQERKAEESLDGLKQMMGQEAVVLIDGQKTTVSSETLVLGDVVTLQAGDVVPADLRLFDVHNLMIEESILTGESEAVEKITGSLNEELPTGDQKNLAFSGTLVQAGSALGVVXETGDSTEVGKINHALQSVDQKTTPLVRKMHQLNKQIFQGIMVLIVFLIFFTTFRHGMEWSLLFFAMIALIVAMIPEGLPAVLRMILSMGVHEMARENAIIKGMPSVETLGSMTVICSDKTGTLTKNEMTVMDVVTEEMTIVKEIMANCQELKLQDQQKIADLQGNPTELSLLQYVDQDQLSLRPVEKKIPFSSSYKYMATRHPQAEGSIIYVKGAPEVLLQLSTLSDNQKGAWQAQAAQLAQKGQRVLGFAYKTVTSQQELTHETLSGLTFAGLAGIIDPPKESAIQAVKESQEAGISVKMITGDHKDTAQAIGEQVGLKHTKKVLEGLEIDAMSDEELAQHVQKVDVFARTTPEHKLRIVTALQNNGEIVGMTGDGVNDAPALKKADVGIAMGIKGSEVTKQAADMVLADDNFHTIAKAVKEGRRIFDNLKKTITFFLPTSLAQGLIVVWALLMNHPLPLTPVQILWVNMVTTITLSYALGFEKASADTMKRPPRDVNEGILTKYSIFRIVYVSVLIMVPGYLMALQFEGQALQQTFLLQSIVLAQAAYMINCRKLVDPSLSTGFFQNKVLFASLGILFLLQALVVYWPVAQQLIGTTSLNGLQLAMIFVHVVSLFFLVEGEKYITKRFMTKESQKTSECPR

SEQ ID NO: 4674 - protein, 119 aa, Enterococcus faecalis
LSRNTTIEEPTYFLSLASLLEKQAIYSIQAQTMTAYFLFQGEPAWKAFLQQELAAYLGTRVKLQAIEYVELSQLTLNEADIIISNFPLDHLDLPVFYLSLIPTKNELRRLAELTLHSYF

SEQ ID NO: 4675 - protein, 181 aa, Enterococcus faecalis
GSLIMKKEIIVYTISDSLGETSQKLLAAASAQYPDISFLNRYNFSFVTTEEELLEILKDALKDKALVVSTLVSKQLITAAKEFSERTGLLYLDLMAPFFELIQAKAGVDPIEEPGRRHQLDRAYFDKISAIEFAVKYDDGKNPQGFLDSDILLLGVSRTSKTPVSMYLANQGYRVSNLPLI

SEQ ID NO: 4676 - protein, 249 aa, Enterococcus faecalis
WTEISLSIEKVSCQYVEKTINMCIIVSECTICLRGIEEEMMKLSKRQEQIIAVVKEHQPVSGERISDILAVSRATLRSDLSFLTLSGILKASPKVGYTYESDNMEAFFFFDVFQTKVQEIMSPPLMVAQDTSIRDAITNLFMYDVGSLYVMDEAKELLGVLSRKDLLRASLNTNIDGTPVAVCMTRVPHVKTCTPEFTILEAADTLQKYEVDSLPVVEKENPKKVIGKITKTKILTYITQQAKEAAQNR

SEQ ID NO: 4677 - protein, 910 aa, Enterococcus faecalis
QETFSIDKLISVHYDVYCTYKTHIKRRSRMKKFIYSFNETHNEGKETLGGKGANLAEMTRLGLPIPQGFTITTRCCMDYLADATFFEEHLQSEILKAVKNLETETGKSFTADNEILLVSVRSGAAFSMPGMMDTILNLGLNDQRVKKFATLTSPGFAFDCYRRLIQMFGDVVYHIPKELFDQQKERLEQELNKKITAFQEEDHFALIVRYQEVFEQHQVVFPQDPVAQLFEAIKAVFDSWNNQRAVVYRNLHHIAHDLGTAVNIQEMVFGNRGLDSGTGVVFTRNPVTGENQLFGEFLLNAQGEDVVAGIRTPEPIRRLRLTMPKVYQDFRHYAELLEYHYRDMQDIEFTIENEKLYILQTRNGKRTAAATVKIALDLAKENRITKQEALLRVTPDTIDQLIHPVFDQEKRQHMERLAMGLPASPGAASGQIVFTAEKAKELTNLGKKVILVRQETSPEDIEGMVVSEAIVTSRGGMTSHAAVVARGMGTCCVTGCESLTVNEETKQLHCGPQVILEGTIISVDGSTGEIYLGEIPTISADNNDDLQELLSWADAYADLTVRANAETTQDLETAIRFGAAGIGLARTEHMFFGEERVLEMRRLILAESEKEATYALEQLLHFQQEDFYQMLKVVQDKPMVVRLLNPPMHEFLPHEKNDIQLLAKQLQRFPVTIAKQIERLQETNPMLGHRGCRLGVTQPQIYKMQVTALFTSAIRLVKEGITVYPEVMIPLIAEKEELLYLKRILKETIDGLFEEHKMTPFPYEIGTMIELPRACLIADQLAEEADFFSFGTNDLTQMTYGFSRDDIGKFINTYREKKIITQDPFQSLDQTGVGQLIQLAVEKARRTKPNMSIGVCGEVGGDPQSITFFQTLGLNYISCSPYRVPIAKLAAAQAKILTEPAVTEEQMVLL

SEQ ID NO: 4678 - protein, 114 aa, Enterococcus faecalis
GGRQMAITINIYYSGTNGGAREFAKEMIASGIVEAIRAEKGNSRYEYFFPMDDEETVLLIDSWTDQEALDKHHASPMMTRITELREKYDLHMKVERYVSDVTDPLTKDAAFIRK

SEQ ID NO: 4679 - protein, 71 aa, Enterococcus faecalis
TSDLPLRRRLLYPTELREQSVLILEVFTTSVNRQKESIPHKQLCEILSFSETRRSFIYYFFCRRSRIIFPK

SEQ ID NO: 4680 - protein, 405 aa, Enterococcus faecalis
YNVRGGKKMTTKRVKKMGKEEMKEMFDLVIYAFNQEPTAERQERFEKLLSHTQSYGFLIDEQLTSQVMATPFQVNFHGVRYPMAGIGYVASYPEYRGEGGISAIMKEMLADLAKQKVALSYLAPFSYPFYRQYGYEQTFEQAEYTIKTEDWPRVKRVPGTIKRVSWADGKEVIKDVYLENQRAHSGGVIRETWWLDYTLNRASKPNNQAIYYSSEGKAEGYVIYRIAAGTFEIVEWNYLTNTAFKALAGFIGSHSGSVQSFHWINGFAGKDLNDLMPTPAASVKILPYMMARIVELQTFLEKYPFQSGEKETYSLEIEDSYGPWNEGIWTITIDEQGKATVTKGAAEKEGTAALKADIQTWTQLFLGYRSAETLSFYERLQGDATIAQRLGQRLVKGMPILEDYF

SEQ ID NO: 4681 - protein, 73 aa, Enterococcus faecalis
EDFRQNIGKGATRDSESYNVQGYHMWTCMDNWSWLNAYKNRYGFIAVDLDDDAKRTIKKSGRWFKEMTANNGF

SEQ ID NO: 4682 - protein, 228 aa, Enterococcus faecalis
KAEHGVFHVDGILYDLGVSSPQLDEAERGFSYHQDAPLDMRMDQDAPLTAREVVNTYSYSELVKIFFRYGEEKFSKQIAREIERVREKQPIETTGELVEIIKTAIPAPARRKGGHPAKRIFQAIRIAVNDELGAVEESLEQAIDLLAKNGRISVITFHSLEDRIVKTMFKEYSTVQDLPPGIPVVPEEFQPELKVITRKPILPSDSELSENNRSRSAKLRIAEKIKSR

SEQ ID NO: 4683 - protein, 144 aa, Enterococcus faecalis
NLDRERGRHMAELKKVNDFHYEAPEMDQPTVATEQDRKMQEETLPVPTLLPKKKLKNVSLLEKLIGVVLVCATIGIAIATIQVRTTIVQTMNDITETQAVIKEKEDNALKLEQERSELSKSDRIKDVAKKQGLENNGDNVRTVK

SEQ ID NO: 4684 - protein, 743 aa, Enterococcus faecalis
IMSKRHKFKQFMKKKNLNPMNNRKKVGIILFATSIGLFFLFAFRTTYIVATGKVAGVSLKEKTASLYEGSQVVKAKRGSILDRYGNPIAEDATSYSLYVVLSKKYTGQNNEKLYAEKKDFDDIAEILAKYTKLDKKTALKYLNNGIHEDGSTQYQVEFGTGGQNITLETRQKIEADLKKKKISGVYFNEHPARLYPNGQFASHFIGYTKAANPDDDKEGLVGAMGLEQTYNDILSGTDGRVYFEKDIYGNALPGTVAEEKKAVDGQDIYTTLDSRLQNTLEDLMTQVNEKYEPVSMTAMLMEAKTGEIVAMSQRPTFNPETKQGLDDNGTWQNLLVESPYEPGSTIKLFTTAASMEQGQFNPNELFNRVGGIQVGDVTVNDHDYTRLNGKEYLNYRQAISWSSNIGMVKLEQKMGDEKWMEYLKKFGFGTSTHSGLSGESAGKLPGTNFVDRAMSAFGQAITVTNFQMMKGFSAIANDGSMLQPHYISKIVDKNTGKETITEPQIVGTPIKAQTAQQIRTYMIDTVEDPTYGIAYDIYKVPGYHVAAKTGTAQISDGKGYVDGASQVLSSVVEMVPADNPEYVLYITLRQAKSGSPSEAMAAIANPLMKLALDIKETDPETTKVASDKVTVADYKNMTPAEALANAKVNGVDPVIIGDGEKIKKQSTPSGQTLMPNQKLILITNGTNYMPDLTGWSKSDVTKFGDLLGLTVEFKGEGYVTKQSIAAETEITEKKLTVTLEGTE

SEQ ID NO: 4685 - protein, 327 aa, Enterococcus faecalis
NIRRDNMEWTQIFIPIVVSFAITVSVMPLFIGYFQMKKQGQVTREDGPTWHSVKTGTPTMGGVVFLVASLITSLAMGLFFHQFTPSLLIILFILVLYGLLGYLDDFIKVFKKRNMGLNSRQKLIGQIFGGLVFYFVYRSEGFSDTLDLFGVAEVPLGIFYGVFIIFWLVGFSNAVNLTDGIDGLVAGLGTISFGTYAIIAWKQQQFDVVIICLSVIGGLIGFFPYNRKPAKIFMGDVGSLALGGLLAAISIILHQEWTLLLIGLVYVCETASVILQVASFKLFGRRIFKMSPIHHHFEMCGWSEWKIDFVFWSVGLICSGITLWILF

SEQ ID NO: 4686 - protein, 155 aa, Enterococcus faecalis
  MISC_FEATURE (148)..(148): Amino acid 148 is Xaa wherein Xaa = any amino acid.
SVQESHYGFFSNLSKGKLTMKKITTYQNKKVLVLGLAKSGVSAAKLLHELGALVTVNDAKQFDQNPDAQDLLTLGIRVVTGGHPIELLDEEFELIVKNPGIPYTNPLVAEALTRKIPIITEVELAGQIADCPIVGHYGAPMGKTTHHXPMIGLTA

SEQ ID NO: 4687 - protein, 317 aa, Enterococcus faecalis
TREGVFSQESTRNTGLVEELNQRNNVLKKGFEQIMTIQWFPGHMAKARREVSEKIKYVDIVFELVDARLPLSSRNPMMDQIVQQKPRLVLLNKGDLADNDQNKKWQHYFQKKGYQTLVINAQQNKGINKIVPAAKEALKEKLAREQAKGLKPRAIRAMCIGIPNVGKSTLMNRLVGKKIAQTGNKPGVTKGQQWLRSGSQLELLDTPGILWPKFEDEEIGKKLALTGAIKDQLLHLDDLAIYGLEFFARFYPQRLTERYGLTEEELFLPAPEQLMLISQKRGFRDDYNRASEMIILEIRSGKLGTYTLDRWEVLGED

SEQ ID NO: 4688 - protein, 345 aa, Enterococcus faecalis
HMFCLFIAIKVRDRDFLSRFLPKNKKLNGGKEMKIIIAGAGAMGSRFGLMLHQAGNDVIFVDGWPEHIEAIRKNGLVADFNGEVVTAKIPIYPQTEVASIDFTADLVILFTKAMQLAGMLEALEHFLNKNTKVLCLLNGIGHEDIIKKYVPYENILLGNTMWTAGLEGPGKVKLFGNGSIDLQNLGAQSEQAAEAVIKVLNNAGLNARYSENILSSIYKKACVNGTMNGLCTLLDCNMADFGETEQADQIVQQIVNEFLAVAEAEQVTLDKQAVLQQIRSCYNRETIGLHHPSMYQDLITNHRLTEIDYINGAIVRKGKVYGIATPYCQFLTELIHCKENLLHAK

SEQ ID NO: 4689 - protein, 302 aa, Enterococcus faecalis
KEREFLMNIQLLKYFIEIVNTRSLSAAARNLFVTQPTLSLALKKMESELGTALFDHSDQPFQLTDTGVYLYEHGQEVVFQFDQLVTDIREMNQKPVKKQLRLGLTTLFAVQFMKEISRFLTTHPHVNLILQQDGSPKLQTMLANKEIDMGLISFPNTLPEIIHIEPLETTTKGYHVYVVVPESNPLSQYEKLTFKDLKDQRFSSLSDNFMIGRLLLDRTRSFGYEPNIILHNDDLQVLLYSLQKNNSICLLPIEYYEVGKSQGLKWIPLKDKFDYFPIGIALRRDFSLTEDVRDFIQIIKEN

SEQ ID NO: 4690 - protein, 139 aa, Enterococcus faecalis
NGLSAGAAAMGIAATTVVLVINSWNVNQSGVTLAVSLGGMKMMMPNLFKYPIILIPCLFTATISAIPVVLFNISGTPQSAGFGLVGLVGPLASLDAGLGILPLLFSWFVVPIVAGLFSKFLFEKVLKIYDSKIVFAYQG

SEQ ID NO: 4691 - protein, 129 aa, Enterococcus faecalis
IFNTFSNKNFENKPATIGTTNQEKSKGKIPKPASNEASGPTSPTKPNPADCGVPEMLNRTTGIAEIVAVNKQGIKIIGYLNKLGIIIFMPPKETASVTPDWLTFQELITRTTVVAAIPIAAAPADKPFY

SEQ ID NO: 4692 - protein, 384 aa, Enterococcus faecalis
KQAVQDLLGKPVNKRSWLGESPMEIAKKRVIAFFEILEKLDVEYFCFHDIDIAPEGNSLKEFFSNIDEITDLIKEKMDETGIKLLWNTANMFSNPRYVNGAASTNNANVYAIAAAQVKKGLDISKKLGGENYVFWGGREGYETLLNTDMKFEQDNIARLFKMAIFYGEKIGHKPQFLIEPKPKEPSKHQYDFDAATTMAFILKYGLEKDFKLNLEANHATLAGHTFEHELNVARNYGALGSIDANQGDVLLGWDTDEFPTNVYDVTLAMYEILENGGIEPGGINFDSKVRRSSFEMEDLLLAHIAGMDTFARGLKSAMKLKEDRFFEDLKEQRYSSFKKGIGAKIISGKENLESLTNYALKNDEPIIESSHIEYVKNILNDYLY

SEQ ID NO: 4693 - protein, 501 aa, Enterococcus faecalis
KDLIIMSYVLGIDLGTSSLKGLLVSEIGDVIATSSSDYPLFSSRPGYSEQNPHDWIKAIENVINDLLSEFPEMKKELKGISISGQMHSLVLLDKDNEIIRPAILWNDVRTTKQCEDIMNCMGREVQEITKNIALEGFTLPKILWVQENEEKNWTKTRHIMLPKDYLVHWLTGCYSTDYSDAAGTLMLDVKKRIWSKTILDKFNIPKEYLPTLFESSAKVGNMRSSLINKFGLETKVEIFAGGADNACAAIGAGIVNSEVAMLSIGTSGVFLSMEDDAENEYQDNLHLFNSALPNSYYSMGVTLAAGNSLKWFRDTFAKDAEFSDLLANIDEVIVGSEGLIFTPYIRGERTPYQDSQIRGSFIGIDSRHSLKHFTRSVIEGITFSLKESKVIMEQRKNLKIKKIISVGGGTKNQQWLQIQADIFGLPITTLETEQGPSLGAAILAVIGCGMCANIDSCIKMFVKYKKVYQPIEKNVLLYNKFFQVYSKVYSTTKEICYQLQE

SEQ ID NO: 4694 - protein, 165 aa, Enterococcus faecalis
RQKHTQEDFYMTQVHFTLKSEEIQSIIEYSVKDDVSKNILTTVFNQLMENQRTEYIQAKEYERTENRQSQRNGYYERSFTTRVGTLELKVPRTRDGHFSPTVFERYQRNEKALMASMLEMYVSGVSTRKVSKIVEELCGKSVSKSFVSSLTEQLEPIVDRAVHIG

SEQ ID NO: 4695 - protein, 64 aa, Enterococcus faecalis
  MISC_FEATURE (59)..(59): Amino acid 59 is Xaa wherein Xaa = any amino acid.
CKLFVNNWKNNPVGVWKIFGSKLNNFHLLKVHFNLMLFYFIQHLNMQRMNREEKEKWNXQHRRN

SEQ ID NO: 4696 - protein, 287 aa, Enterococcus faecalis
  MISC_FEATURE (8)..(8): Amino acid 8 is Xaa wherein Xaa = any amino acid.
GGKGKVEXTTQTQLVEIQQVVLRMSKYFVAFCEEHNLTCYFCGGGCIGAIRSQGFIPWDDDLDFFMPRPDYEKLKVLWPKYADTECYPLLVASKTYNDHNSFMTIRDAQTTFIKTYQDGLAIPHGIPIDIFPLDGAPKGNFQRKKQKIWALIYALFCSQVVPEKHGGILATGSRVLLNIFPSKKVRYHIWRFAEKRMTKYSFGSTPYVTELCVGPRYMGNIYHLEDFKSAIFVPFEDTKMPIPVGYKRYLTEVFGDYMQLPPEEDRQPHHEALIVDTKKSYTEYLKK

SEQ ID NO: 4697 - protein, 899 aa, Enterococcus faecalis
IYKESFMKKIISGMLICTVLLNSFSVIASGEELVKTETTGETGLVTQATSETTTNSTEDTSSVTEENTSERDSSTSSTKEESLDSSTNSTTEEHSSVSETNTTDSKTEASQSSEVEKKTIDQDEADYQEAAREGTNHKKGTYAMKNGLSSRVARATVANVYANDPNLPGKNFIDVSSWNGDISVAEYQKIKSYGVTGVSVKLTEGTWYVNPYAAGQIRNAKAAGLKVSAYHYSMYVSAATAQDEARYFAQAAANSGLDKNTIMFNDAEDPTLTNNGRNAHANSVAFNQQLKALGYKNDALYVGKWWLTNGYIDTSAFGRDRVWVAQYPYTPDSSMQWNNDHGAWQWSSQMYFPGLANYEGRPFDISMTYSNFLNMGNSSGPDLSKYYTTNPGRVIMKNDDTFYQDVAFRTPGWRVKKNTLVTIKGIEYSSAGIPRLVTDQGYLTANKDYVLAAQSNIDLYFTTNPKKVRLKSDDYFYADPEFKQRLSKVSKGTIVEVEDLAYTQSGIFRLKTAKGYLTANKNIVEQYKGLEDTYYTSNPGQVITRNEDTYYKDVEFKTKANKVSAGSVLKVTAIEKTKSGIPRLKMANGYYFTANKNYVVATGSWIANYHTVNPGQIIMKNSDNFYGDSDFLYKGAAVSKGSLVPVVGIEYRENQVPRLITQNGYLTANKSYAQKVVPNIKDYLYDYPEYVVMKTNDYYYQDVNFSKKGEFVSKDTLIKVLSVDYTENGLPRLKTAKGYITANKSYVTKLVSNSDNYFTENPHQIIMRVSDKLYTDVEFRNGSRTLSSGTVVPVKGIEYSSKGVPRLKTEGGYLTANKNYVTAAGNTNNNYFITNPKKVKLLIDDCFYNNTEFTKKGQAVKKNTIVEVEAIEYTNNGIPRLKTKQGYLTANKWYVAKVG

SEQ ID NO: 4698 - protein, 85 aa, Enterococcus faecalis
HLCWTYFYTSSTKVFFYREKDFIGQKFSLFIKGLKVLLKLMKSITIIFLFNQYLNKKRNTIKPKTIKIYKIKHRQYLQGSVNNFV

SEQ ID NO: 4699 - protein, 120 aa, Enterococcus faecalis
FKAVYRANSKEEANTFLSGMIEKWKKNYPKVTQSLIENQDLLTFYDFPPSIRRTIYSTNLIESFNKQIKRYSRRKEQFQNEESLERFLVSIFDTYNQKFLNRSHKGFQQVTDTLVSMFTE

SEQ ID NO: 4700 - protein, 180 aa, Enterococcus faecalis
LEAEAVVRVTSLDIHAHKIKLINENAQRIHVADVVQAERLDARQVAEEFPAETFDRILVDAPCSGLGLMRRKPDIKYHKTANDFQNLPKIQLEILESVAPTLKQWGIMVYSTCTITPEENQEVVAAFLAKHPEFEKIEIVANENVQAVVKEQELVLYPHQYMTDGFFICCMRKVSSNEVK

SEQ ID NO: 4701 - protein, 251 aa, Enterococcus faecalis
NNLEINVQSDVGRKRNTNQDYANVFENQQHITFAVLADGMGGHQAGDVASQMAVNNLGESWSNASVDSAEKSAQWLIQAIQKENEKIYERGQSKPEYLGMGTTVVGAILLPDSFVLANVGDSRAYLVRDQHMLQLTEDHSLVNELVKSGEITREMAANHPRKNVLTRSLGMPGTVEVDVTNHEWLPNDYLLLCSDGLTNMVPETKILEILETSDPLKSKLSQLVAQANEAGGLDNITVLVIHFDEQKEENQ

SEQ ID NO: 4702 - protein, 725 aa, Enterococcus faecalis
RTEGGKPMIEIGKKLNGRYHIIGSIGSGGMANVYLAHDLILDRDVAVKVLRFDFQNDQAAIRRFQREALAATELVHPNIVSVYDVGEEDGLQYLVMEYVKGMDLKRYIQTHFPIPYSTVVDITQQILSAVAMAHEHRIIHRDLKPQNILIDEHGTVKITDFGIAIALSETSITQTNTMLGSVHYLSPEQARGSMATNQSDIYAVGIILYEMLTGNVPFDGESAVTIALKHFQEEIPSVKMFDPGIPQSLENVVRHATAKDPSDRYKTANEMAEDLYTSLSASRLNEPAWEPTALLGETKVLTPIPEDIAEPEETTPVEVPEDIADDILAEQPPKKNRKKLWIGLAIAALISLAIGGLAFAMSGGKDVEVPDVTNETKADASQALKSAGLKVDSETKKIPDDKIEEGKVVKTDPEAKSSVKKGRSVTLYISSGTEKIEMADYTKESYESAVEALKKLGFSEDQITTKKEYSDSVSTDSIIKQKPAAGKKVDPKKDNVTLTVSQGPETVTLPSYAGYSYENAVNALAQLGISDSQITRVDQASDTVEPGLVITQDPAPGGTVTPKNGQVTLYVSKGSDKVTLSDYSGISYDNAVSRLIALGIPESQIKRVDEESDKVEKDTVISQEPASGTAVDPKNDTITLHVSKGSDSVTVPDISGYSPKAAEDSINNAGLKINEQGLSGSGDGQVVERTSPSAGSKVKKGDSVTVYYSKANDSKSTTSESSTSN

SEQ ID NO: 4703 - protein, 299 aa, Enterococcus faecalis
LGVVYLKGQIRKALSGFYYVYADGETYQTRARGNFRNRKITPLVGDEVLFESDNLTDGYVLEILPRRNELVRPPVANVDLGVVVMSMVSPNFSFNLLDRFLVSLEYKDIEPVIYLTKVDLLDEPQRQQVTEIKQIYEALGYAVIASEDVEATKELERFFPERLTVFMGQSGAGKSTLLNQISPELQLATAEISQSLGRGKHTTRHVELIPLYDGLVADTPGFSAIDFLEMEAVELPKQFPEFVAAASHCKFRECMHHKEPGCEVKRQVEAGTIATSRYENYLQFLMEIENRRPVYKKKS

SEQ ID NO: 4704 - protein, 229 aa, Enterococcus faecalis
EKIIANIKGASQMKLAPSILSADFANLERDIRLVEELGADYIHVDVMDGQFVPNITLGPNIVSAIRPVTKLPLDVHLMIVQPENYINAFAEAGADIITVHQEATPHIHRALQMIKNAGVKAGVTINPGTPLSMIENVLDLADQVLVMTVNPGFGGQSFIENSLEKIAQLKEWKETKGYTYEIEVDGGIVPETAARCKEAGAEVFVAGSYIYNAENPQERIDALRAVLDK

SEQ ID NO: 4705 - protein, 175 aa, Enterococcus faecalis
FEYLKERGLQGTELVISDAHKGLFSAIRKSFTNVSWQRCQVHFLRNIFTTIPKKNSKSFREAVKGIFKFTDINLAREAKNRLIHDYIDQPKYSKACASLDDGFEDAFQYTVQGNSHNRLKSTNLIERLNQEVRRREKIIRIFPNQTSANRLIGAVLMDLHDEWIYSSRKYINFDK

SEQ ID NO: 4706 - protein, 150 aa, Enterococcus faecalis
VEMVKTLYSILHRSLDLTEFMEEVLIDDNMVFDIDNLKGFLNDTSSFGFIAKENNKIIGFAYCYTLLRPDGKTMFYLHSIGMLPNYQDKGYGSKLLSFIKEYSKEIGCSEMFLITDKGNPRACHVYEKLGGKNDYKDEIVYVYDYEKGDK

SEQ ID NO: 4707 - protein, 479 aa, Enterococcus faecalis
MNIVENEICIRTLIDDDFPLMLKWLTDERVLEFYGGRDKKYTLESLKKHYTEPWEDEVFRVIIEYNNVPIGYGQIYKMYDELYTDYHYPKTDEIVYGMDQFIGEPNYWSKGIGTRYIKLIFEFLKKERNANAVILDPHKNNPRAIRAYQKSGFRIIEDLPEHELHEGKKEDCYLMEYRYDDNATNVKAMKYLIEHYFDNFKVDSIEIIGSGYDSVAYLVNNEYIFKTKFSTNKKKGYAKEKAIYNFLNTNLETNVKIPNIEYSYISDELSILGYKEIKGTFLTPEIYSTMSEEEQNLLKRDIASFLRQMHGLDYTDISECTIDNKQNVLEEYILLRETIYNDLTDIEKDYIESFMERLNATTVFEGKKCLCHNDFSCNHLLLDGNNRLTGIIDFGDSGIIDEYCDFIYLLEDSEEEIGTNFGEDILRMYGNIDIEKAKEYQDIVEEYYPIETIVYGIKNIKQEFIENGRKEIYKRTYKD

SEQ ID NO: 4708 - protein, 151 aa, Enterococcus faecalis
SLPLEIFTNVSWQRCQVHFLRNIFTTIPKKNSKSFREAVKGIFKFTDINLAREAKNRLIHDYIDQPKYSKACASLDDGFEDAFQYTVQGNSHNRLKSTNLIERLNQEVRRREKIIRIFPNQTSANRLIGAVLMDLHDEWIYSSRKYINFDK

SEQ ID NO: 4709 - protein, 68 aa, Enterococcus faecalis
NYRFMIQSAKAKRPDHIFEYLKRTRLQSTELVISDAHKGLVSAIRNLHQRKLAKMPSSLPKKYLYHHS

SEQ ID NO: 4710 - protein, 426 aa, Enterococcus faecalis
ENRLLVGMEWDESPAHPGEYGPYRQSERKEIYQPLIDQLLSSNRAYKCYCTPEELEAEREAQQARGEMPHYAGTCANLTPSEQAAKEAAGLEPVIRFRVPRNTEYKFDDIVKGEITFESDNIGGDFVIQKRDGMPTYNFAVAVDDHLMKISHVLRGDDHIANTPKQLMIYEAFEWTPPVFGHMTLIINSETGKKLSKRDETILQFIEQYRELGYLPEAMFNFIALLGWSPVGEEEIFSQEDLIKLFDEQRLSKSPAAFDAKKLEWINNQYMKQMDLSELTDMCIPYLVADGRVEENPSPEKIEWLKQLVSLYQPQMSYAAEIVELSNLFFNEHPVLDDAAKEFLQGETVPTVLHAFKEQLEALDVFDVPSIKAAIKAVQKETGVKGKNLFMPIRIAVSGQMHGPELGETIELLGKEKALDHLNKVL

SEQ ID NO: 4711 - protein, 184 aa, Enterococcus faecalis
KGVHHMSWLKRSVAAVKRNDPAARTTLEVLLTYPGLHALFWHRLSHFLYRHQLFLLAKIHAQFWRFITGVEIHPGATIGAGVFIDHGMGIVIGETAEIEEDVVLFHGVTLGGTGRDTGKRHPTVKKGAMISARAQILGPVVIGERSKIGAGAVVISDIPADATAVGVPAKVVRLNGRKVEKGHD

SEQ ID NO: 4712 - protein, 478 aa, Enterococcus faecalis
MEERWKKGMIKIYNTLTREKEVFTPIEARKVRMYVCGPTVYNYIHIGNARSAIAFDTIRRYFEYRGYEVNYVSNFTDVDDKIIKAAKELKITAPEVAERFIKAFEEDTQALNVQPATLHPRVMDHMPDILAFIEVLIEKGFAYEVAGDVYYRTRKFPNYGKLSHQSIDELEVGASQRTGVEQQLKEDPLDFALWKSAKEDEISWDSPWGKGRPGWHIECSVMATKHLGETIDIHGGGQDLEFPHHENEIAQSEAKTGHTFANYWMHNGYVTIGEDDEKMSKSLGNFITVHEMIQKVDPQILRFFMSTTQYRRPIRYSESTLKEAAANYQKLKNAFENLRFRQADAVASLPEDEHYLAQLNELEQRFITEMDDDFNAANGITVVYELAKMMNQYSEQATVSEPVLVAMDKLFSGWLAIFGLFFKNEELVDAQVDALIEERNQARKDRDFARSDEIRDLLKEQGIVLEDTPQGTRWRRSE

SEQ ID NO: 4713 - protein, 132 aa, Enterococcus faecalis
MRDYKQLNGLALAYVGDAIYEIYIRDYLVSLGQTKPNVLHRMATHYVSAKAQASLMQAMLAGEMLTEEEEVMYKRGRNAKSHTFAKNADVTTYRVATGFESLMGYLHLTQQKERLEELINWCIKKVGETNEK

SEQ ID NO: 4714 - protein, 121 aa, Enterococcus faecalis
VKPMKNEKSRPFKKGKKRSDKRSKERNPRPATAGADGTSEELADNFVFGFHATVEALQQGRGNKLFLQEDARGEKIEQLKQAAKEQAVPVKWVPKAKLDTMSDHRVHQGMVLAITAYQYLT

SEQ ID NO: 4715 - protein, 526 aa, Enterococcus faecalis
RLKLQPPGLFLGLKGLFFKEIFLQLFGASVANIPGSFQQMLSVITDTVFAFLPALMFWSTFKAFNATHVIGIVIGLMMVSPILPDAYAVATPDSGVKAIMAFGFIPVVGAQGSVLSAIAAGIIGAKIELFFRKKMPNILDQIFTPFMTMLITFLIMILGIGPILHTVELGMVDVVQWLIGLPLGLGGFVIGASYPLMVLIGIHHTLTMVETSLLANTGFNALITICAMYGFANVGSCLAFAKKAQDSKVKSTAIGSMLSQLFGVSEPVLFGLLIRWNLKPLLCVLFTSGLGGAILAIFHIQSNSYGLAVIPSFLMYIYSAHQLVIYLLVALLSVGVCYALTSLFAIPQEVLISDKVIEEEEREVFEMQHNTLDEQLFSPVTGYAMNLTAVNDPVFSSEMMGKGLAIMPTANKVYAPADGLLNLVAETGHAYGIQTDAGAEVLIHIGIDTVTLGQEVFQTQVTQGHRVKKGDLLGTFDRKAIKEAGLDSTVMVIITNTSSYLSVKPMMSDHNEITPEQIILNLNTPN

SEQ ID NO: 4716 - protein, 236 aa, Enterococcus faecalis
HFLMNLHNNTSGGLFVKVAGDKIKQARKLKKITQSELANGICTQATISNIENRNLCDSLDIFSSICLRLDLEVEECMMISEEKKIENLLNKVEDLSLRLFHLEAYNLLQEVPEGLILSNNELTTKLLYYKGITCLLGKKDKAEALFYLYRGAEIDRKVNIYNILSLNALGTLYELEKDMRKAQVYYEKSLQELEQFKLECSLERCRIYYNSAKFYSEMKDYPKKCHFKRKRDSDLS

SEQ ID NO: 4717 - protein, 321 aa, Enterococcus faecalis
EDLKMKRVIWFRRDLRLQDNKALAHALQNSAADELILLFQMNPQQFIQESANHNAFFASLASFKERIDQEAHLQIMVGEPLDLFSRLKRKLPDWQAIYFNEDTCGFGAKRDQQAMRFFEENNIQSFSFQDAYLHGSEEIKKNDGSKYQVFTPYYNKWKEAPKETPIPVSYTAEKIFSACLFPEEEAAYREQIARIPLTHYSVGEETARRRLNTFIDQKLQSYENKRDFPYQDQTSHLSTFLRTGELSIRTIWQELASVPSSLSKETFKKELAWRDFYNMIYSAFPQQKEEAIQEKFRYIQWTNDPEMFVKWQKGETGVPYN

SEQ ID NO: 4718 - protein, 202 aa, Enterococcus faecalis
SIVRFHNKKRKLFKKNFVIFNGQMTQKCLSSGKKGRRGYPIIDAAMRQLNQTGWMHNRLRMITASFLVKNLHIDWRWGEKYFQKMLIDYDAANNIGGWQWAASTGTDAVPYFRIFNPIIQSKKFDNDGQFIKKYVPELKQVPQKYIHQPNLMNEALQTQYHVHLGENYPKPIVDYASSKKQTLFLYEASKEIHQEMNNPRFQ

SEQ ID NO: 4719 - protein, 205 aa, Enterococcus faecalis
RNILIYQDGFSRRYPLIEVGTMTLNRNPENYFAEVEQVTFSPGNFVPGIEASPDKLLQGRLFAYGDAHRLRVGANSHQLPINQAKAPVNYYQKDGNMRFNNGNSEINYEPNSYTETPKEDPTAKISSFEVEGNVGNYSYNQDHFTQANALYNLLPSEEKENLINNIAASLGQVKNQEIIARQIDLFTRVNPEYGARVAQAIKQQA

SEQ ID NO: 4720 - protein, 193 aa, Enterococcus faecalis
SLLCRPQGLAPSVKSYQNIYPNMYTLAETFDLENLSLVQAGPFENLDEGFDVYATQAFNAPDGRALAVSWIGLPEITYPSDVEGWANGLSLVKELTIHNGKLFQYPVSETEMLRQSATTLSNGCHFLSTASFELEVDIPKNEIAFIRLLANETGSKGLLITIDTIHGKITLDRTFAGQSFAEKYGTIRETKIR

SEQ ID NO: 4721 - protein, 299 aa, Enterococcus faecalis
NLSLEVVYGDEESLNRTIKTGEISRPGLELTGYFNYYSHDRLQLFGSKEITFAERMMPEERLLVMRRLCAKDTPAFIVSRGLEIPEELITAAKENGVSVLRSPISTSRLLGELSSYLDGRLAVRTSVHGVLVDVYGLGVLIQGDSGIGKSETALELIKRGHRLIADDRVDVYQQDELTVVGEPPKILQHLIEIRGIGIIDVMNLFGASAVRGFMQVQLVVYLEAWEKDKKYDRLGSDDAMVEIANVDVPQIRIPVKTGRNVAIIIEVAAMNFRAKTMGYDATKTFEERLTRLIEENSGE

SEQ ID NO: 4722 - protein, 289 aa, Enterococcus faecalis
  MISC_FEATURE (284)..(284): Amino acid 284 is Xaa wherein Xaa = any amino acid.
RKFRRIEGEDVMMLAQVNSIAFRLFGIPVYWYAIIIVSGIALAVWLSSREAVRVGLKEDDVSDFMLWGLPAAIVGARLYYVAFQWQDYVDNPIEIFFTRNGGLAIYGGLIGGGLALFFFTRHRFISTWTFLDIAAPSVILAQAIGRWGNFMNHEAYGPATTRQFLENLHLPTFIIDNMNINGTYHQPTFLYESVWNVLGFIVLVLLRKKPHFLKEGEVFLGYIIWYSFGRFFIEGLRMDSLYAFSNIRVSQLLSLVMFVAAIVIVIVRRRNPNLKFYNREKREXKITTS

SEQ ID NO: 4723 - protein, 332 aa, Enterococcus faecalis
VPGSWGTALVQVLAENGHEVCIWGNKPEQIDEINTKHTNKHYLPELILPTSIQATTDLATALVDVDAVLFVVPTKAIRSVAQEVAQHLKTKPIIIHASKGLEQGTHKRISEVIAEEIPAEKRQGIVVLSGPSHAEEVAVHDITTITAASENLADAVYVQELFMNDYFRIYTNDDVIGVETGAALKNIIALGAGAIHGLGFGDNAKAAIMTRGLAEISRLGVAMGANPLTFIGLSGVGDLIVTCTSVHSRNWRAGNLLGKGHKLDEVLENMGMIVEGVSTTKAAYELAQQLEVEMPITETIYNVLYNDEDVQQAAKEIMLRDGKTENEFTLDF

SEQ ID NO: 4724 - protein, 294 aa, Enterococcus faecalis
FLGGKKMKVKKAVIPAAGLGTRFLPATKAMAKEMLPIVDKPTIQFIVEEALASGIEDILIVTGKAKRPIEDHFDSNVELENNLKEKNKTDLLKLVEETTDVNLHFIRQSHPKGLGHAVLQAKAFVGNEPFVVMLGDDLMEDKVPLTKQLMDDYEQTHASTIAVMKVPHEDTSKYGIINPEKEIEKGLYNVENFVEKPKPEEAPSDLAIIGRYLLTPEIFDVLENQKPGAGNEIQLTDAIDTLNKTQRVFAREFKGERYDLGDKFGFMKTSIEYGLTHPDVSDNLREYIITVRAQ

SEQ ID NO: 4725 - protein, 64 aa, Enterococcus faecalis
PPLCAKELGHEEFYPYKVFIVTFMRWCRNISWCHPKIISYISDGNYDMSSGDTAALIAPVTYVV

SEQ ID NO: 4726 - protein, 250 aa, Enterococcus faecalis
YKPRRQKSMQKKLVWRDYLYVGSMLFGLFFGAGNLIFPVHMGQEAGASVFLANLGFLATGIGLPFLGVIAMGVSKSSGVFDLASRINRRYALIFTLLLYLTIGPFFALPRLATTSFEIGLAPFVPKDLQWLVLAGFSALFFLAVWLFSRKPSKILDYVGKFLNPLFLALLGILIVLAFVKPLGHVASAAVGENYISSPFFKGFTEGYNTLDALASLAFGIVVVSTLRNMGVEKTGDIAKGMINHVLSVLY

SEQ ID NO: 4727 - protein, 66 aa, Enterococcus faecalis
SKILLGFLEKSQTAKKNNAEKPARTSHCKSFGTNGARPISKEVVANLGKAKKGPIVKYNSKVKIRA

SEQ ID NO: 4728 - protein, 216 aa, Enterococcus faecalis
SCAISVVLIGIIYTLLAYMGTMSIGAFPISENGGIALAQIANYYLGLPGSILLAFIVVLACLKTGIGLSTAFSETFEEMFPKVSYQKFLAIVVILPAIFANVGLTNIIQFAVPVLMFLYPLAITLMLLVIISPIFKHRREVYQATTYITLIAAVLDALNSAPAFIKDTAFVTTLLEKAGQYLPLFTIGMGWVVPATVAFLISWVWVMISKKDPILD

SEQ ID NO: 4729 - protein, 115 aa, Enterococcus faecalis
IEVTNKYWRKLPMLVTTTERISGQEYEIIGEVFGLTTRSKNMFKDLGAGLKSVVGGEIKGYTDMQREARDQAIERLKAEASKLGADAVVMMRFDSGTIGTDMQSVVAYGTAVKYI

SEQ ID NO: 4730 - protein, 252 aa, Enterococcus faecalis
RKIMPRYKAIIAYDGTHFHGFQKQPNERTVQEEIEKTLARMNNGRSVTVFGSGRTDAGVHAMGQVIHFDYPQERPLEKMRFALDTQTPEDIAVRSVERVSEDFHARYHVIEKTYQFKVDIGKPRSPFRRFYASYFPYPIDLEKIQQALPDLLGTHDFTSFCASGSSVEDKVRTIHEASVHVNETGDELTFTFRGDGFLYKMIRILVGTLLKIGNGRLEPTAIPAIIAAKDRNLAGPTAHPEGLYLAEVKYEN

SEQ ID NO: 4731 - protein, 267 aa, Enterococcus faecalis
GKMMNKLIFGRYIPGDSFIHRLDPRAKLLASFYFIGIIFLANNWQSYVLIAAFTAFAISLSKISARFFIRGVRPLLWLILFTVALQTLFTQGGEVYFQWGIISITQFGVTNGLFIFCRFVLIIFMSTLLTLTTAPLELSDAIEYLLRPLHVVKFPVHEVSLMLSIALRFVPTLMDETEKIMNAQRARGVDFGEGNLLQKMKAIVPLLIPLFVSSFNRAEDLATAMEARGYQGGEGRTKYRILHWHLRDTIVMFGFVLLTIGLFVLRT

SEQ ID NO: 4732 - protein, 316 aa, Enterococcus faecalis
KIKSSFERAWRCCANELFNRRRDGGLVMDIRFKQVDFTYQPNTPFEQRALFDINLTIQDGSYTAIVGHTGSGKSTLLQHLNALVKPTKGQVTIGERVITPETDNKNLKPIRKKVGIVFQFPEAQLFEETVERDIAFGPKNFGVSDEGAKKLAKKMLDLLGLDEKYLQHSPFELSGGQMRRVAIAGVLAMEPEVLVLDEPTAGLDPKGRKEMMEMFSRLHKEHNMTIVLVTHLMDDVANYADHVIVLEKGQIVRAGAPQEVFQETQWLKEKQLGVPTAAEFAEKLVAKGFSFEQLPLTADQLADQLLKKMQEAGEAK

SEQ ID NO: 4733 - protein, 272 aa, Enterococcus faecalis
IISNLIINQKNASPALKDVSFSIQQGEWVAIIGHNGSGKSTLAKTINGLLLPAAGTIKVGGKELNEANVWDIRRMVGMVFQNPDNQFVGSTVEDDVAFGLENQGIPRDEMVERVHDALERVRMLDFAKREPARLSGGQKQRVAIAGVVALRPDIIILDEATSMLDPEGRAEVIATIQKIKEESNLTVISITHDIDEAANANRILVMRQGQLTNEGTPEKIFSAGEALVEMGLDLPFPEKLKVALKERGVVVPTNYLTEEGMVDWLWTSVLNK

SEQ ID NO: 4734 - protein, 60 aa, Enterococcus faecalis
  MISC_FEATURE (1)..(1): Amino acid 1 is Xaa wherein Xaa = any amino acid.
XNATFLVVLERINRLREYAMQPIIELNNIQFNYQPEKCFSRFKRCVFFHSTRRMGRYYWP

SEQ ID NO: 4735 - protein, 155 aa, Enterococcus faecalis
RMDVGTRFNVIAENARLEGTVRCFSVATRNRVEQALQRYAEQTAAIYGGTASLDYQYGTLPVINDEQDALFAQTLIKENFGEAALRQEEPTTGGEDFSYYTEHASGCFALVGSGNPEKDTEWAHHHGRFNIDEDAMAMGAELYAQYAFEYLKTHF

SEQ ID NO: 4736 - protein, 259 aa, Enterococcus faecalis
PWGKEVPTVESLKKCFDLQGKEIVSIVGSGGKTSLMWALAKTYRKEAVLVSTTTKIGFPQRQLYDYFYTNHFEKITPNICGITLAGTAINNQTKLTMPAMTSFQTLFQHFTKVFLEADGSKQRPLKGWSSYEPVILKETTTTIGVLPISVIGQKIDETTIHRLPLFLELTDAQLQEPITETLLAQLIDHPKGLFKESQGQRILCLNQTHTRREFVQAMNVCLQLPKSCFEKLDKIIACNMELEKGLILWEKSVKTSKKN

SEQ ID NO: 4737 - protein, 97 aa, Enterococcus faecalis
SNYALTKKEGEKMEYLLTFPNTHYAVQAEQVLLARKVAVRVFTLPPSLTDGCGIGLLINEAEITHSVCFLEEAKVRVASIFSVKNDLGERRYQLWSP

SEQ ID NO: 4738 - protein, 200 aa, Enterococcus faecalis
REGPNMKLVDALGKPCPIPVIETKKALAELGLAGGTIEVLVDNEVAIENLKKLATKKQATLTAKQIEATVFSVKITVPEEATQQTSQSATDLVITIGSDQLGTGDEQLGRLLMKSYLQSLSEAETVPTQLLFFNRGAFLTNQAANTLADLQQLAEKGTTIQTCGACLDFYHLTDTLAIGSITNMYEIVETMNQAAKVITL

SEQ ID NO: 4739 - protein, 345 aa, Enterococcus faecalis
EGADSMDFLSQCTSGGCGAKIESRVLNQLLQHLPETPANERLLVGFEHADDAAVYQITSEKALISTVDFFSPMVNDPLSFGKIAVANALSDVYAMGGTVLYALNLVCFPQKMSKEWLEQMLLGGSLKLKEAGALLAGGHSIYDHEPKYGLAVTGEVHPENLWHNNTPQVGDVLILTKALGVGIIQAAVRGQLAKQTEQKIAQDSMERLNKYAAANARSYAVHACTDVTGFGLLIHAKEMADNQVTLLIDTEALPTITGALAYAAECLVTAAGQRNRQTIGTTIDYSKISMEMQELLFDPQTSGGLLISVAADEAAACLAAIQKEDPVAKIIGEVLPKEQQAVVLL

SEQ ID NO: 4740 - protein, 254 aa, Enterococcus faecalis
EVEGIQRAWRTNTKALVMTHASNVLGTILPIEECFQWAQQKGLLTILDAAQTAGFLPIKMTQMAIDVLAFTGHKSLYGLAGIGGLAFSERGAEAVKPLMAGGTGSHSNSFDQPSFLPDKFEAGTLNSLGILSLNSSIKELNKIGLAAIQKHERTLMQNFLNGLSGLPVTILGTKDVAQTVPVVSITLWNQEETIVAQQLAEQYGIMTRAGLHCAPLAHQTAGTLATGTLRFSFGWQTTPEEITWTIHALQELLI

SEQ ID NO: 4741 - protein, 214 aa, Enterococcus faecalis
FFCATLIRRGDGMEQSFFRELLHYQRPKDNPFRLVFAGLVMFSILFLGYINHQLLISSFGSLGIFTFLYYQPLPLKQLMTRLSVVGSYLFLGNLLGMLSTHIAWLIPIVVALVGFGGRFFFEVYDISKPGAFFGVMVTAMGASTSIPLAKIPFMSGCMLLGIGFSILFALVLHFTEKEISVPLAKRSLRERIYQHPEAPLDTIYYSFVFASPRD

SEQ ID NO: 4742 - protein, 835 aa, Enterococcus faecalis
GGITMDELFTESAKAVLAIAQEEAKYFRHQSVGSEHLLLALVLEPNGIAGKTLRQLNTDTEDIREEIEHLSGYGTMQSPMGNNNLYLPYSPRAKQIFAYAGDEAKRLGAQKIGTEHLLLGLLRDEEILASRILVNLGLSLSKMRQLLLKKMGVSEPNGAQRRRNGQNKNAPQGTPTLDSLARDLTKLAREQSLDPVVGRGTEVRRLIQILSRRTKNNPVLVGEPGVGKTAIAEGLAQKIVNREVPEDMQGKRLMMLDMGALVAGTKYRGEFEDRLKKVVDEIYQDGQVILFIDELHTLIGAGGAEGAIDASNILKPALARGELQTIGATTLDEYQKYIEKDAALERRFARIQVAEPTPEEAEEILKGLRSRYEKHHGVEITDEALHAAVQLSIRYLNDRQLPDKAIDLMDESAAKVRLDKADQPSEINELRTEISQLITEKEEAIQNQSFESAARIRQKEKQVMEKLEELIAVKEKSLSGYSTQVTEEDVAGVVSQWTGVPLQQLEKKESERLMELETILHQRVVGQNEAVEAVSRAIRRARSGLKDPARPIGSFMFLGPTGVGKTELAKALAEAMFGSEEALIRVDMSEFMEKYSTSRLIGSPPGYVGYEEGGQLTEKIRQRPYSVILLDEVEKAHPDVFNILLQVLDDGHLTDAKGRKVDFRNTILIMTSNLGATAIREEKHVGFNVKDISKNHELMQKRIMEELKKAFRPEFLNRIDETVVFHSLKQEEIHEIVKIMSQSVVKRMAEQEVKVEITPAAIEVIGKVGFDPEYGARPIRRALQKEVEDRLSEALLSGQIQLGDKVTLGASKGKITLNVRAPKAPKTEAKELQTV

SEQ ID NO: 4743 - protein, 164 aa, Enterococcus faecalis
SRREEGWKIMSNQNSSDLIEAYLKKILEESNKIEIRRAEMANLFNCVLSQINYVINTRFTIQRGYAVESKRGGGGYIRIVKVQISDNDQLLKQMDQLIGATLTEKDALTFIQTLYEEEVITKKEGNLMLAALSKSTLNGLGNHEDFLRAQIMRSFLERLSYEEE

SEQ ID NO: 4744 - protein, 60 aa, Enterococcus faecalis
SSIPLLSGINIDQDYIELCLLNKEERFDFNKKMQNRRSNLSQTDLSSPPKNENMLLNHRG

SEQ ID NO: 4745 - protein, 294 aa, Enterococcus faecalis
  MISC_FEATURE (10)..(11): Amino acids 10 & 11 are Xaa wherein Xaa = any amino acid.
SSELVVFVNXXRSASSCIYIEFGVSLTKVDVAETEELFQFVQENTKVIYFESPSSQKFELLDLEKITALAQKIGAYTVIDNTWASPLFQHPLCHNVDLVIHSCSKYIGGHSDIVAGAVIGKAALVDQIFEHGHQALGAVNSPFNSWLALRGIRTMPVRLAHQSQAIQTVLLALQKDPRISRLYHPFVGNQQQQALAEKYLTGYGSLFAIDLKDTDFERLKTFVNALTLVTIGVSWGGFESLALPVFKGNNLAAVQKRGLSPAHIRMYVGLEEPTSIIEDIQQALDQAYGEESLL

SEQ ID NO: 4746 - protein, 370 aa, Enterococcus faecalis
RQLLLDEMEVMRVKIGFFTDTYFPQVSGVATSIKTLKDELEKHGHEVYIFTTTDPNATDFEEDVIRMPSVPFVSFKDRRVVVRGMWYAYLIAKELELDLIHTHTEFGAGILGKMVGKKMKIPVIHTYHTMYEDYLHYIAKGKVVRPSHVKFFSRVFTNHTTGVVCPSERVIEKLRDYGVTAPMRIIPTGIEIDKFLRPDITEEMIAGMRQQLGIEEQQIMLLSLSRISYEKNIQAIIQGLPQVIEKLPQTRLVIVGNGPYLEDLKELAEELEVSEYVQFTGEVPNEEVAIYYKAADYFVSASTSETQGLTYTEAMAAGVQCVAEGNAYLNNLFDHESLGKTFKTDSDFATTLIDYIQANIKMDQTLLDEK

SEQ ID NO: 4747 - protein, 341 aa, Enterococcus faecalis
SRKGGAGLKILLYFEGEKILAKSGIGRALDHQKRALSEVGIEYTLDADCSDYDILHINTYGVNSHRMVRKARKLGKKVIYHAHSTEEDFRNSFIGSNQLAPLVKKYLISLYSKADHLITPTPYSKTLLEGYGIKVPISAISNGIDLSRFYPSEEKEQKFREYFKIDEEKKVIICVGLFFERKGITDFIEVARQLPEYQFIWFGDTPMYSIPKNIRQLVKEDHPENVIFPGYIKGDVIEGAYAAANLFFFPSREETEGIVVLEALASQQQVLVRDIPVYQGWLVANENCYMGHSIEEFKKYIEGLLEGKIPSTREAGYQVAEQRSIKQIGYELKEVYETVLS

SEQ ID NO: 4748 - protein, 70 aa, Enterococcus faecalis
RMTVNHDVVGSSPTAGVEQKQKPTWFLLFLFYSLFFDKLEEGTLKTFIRLKGSYRRMNTSNFSYGIMCLL

SEQ ID NO: 4749 - protein, 82 aa, Enterococcus faecalis
FRGFRMEGPFVQGIKVTLGITGLSPPRVHIDGEVWHLDVGSSHPGAVVGPKGWAVRPLKRHASWVQNVVRQFGPYPSRALEI

SEQ ID NO: 4750 - protein, 71 aa, Enterococcus faecalis
ITNSTFLAHFKLAPGSKHYNSVTFNLSTMVLIKRLDFPVPELGAFFGGKFPPIIVVPTCILFPGTPKKRNP

SEQ ID NO: 4751 - protein, 82 aa, Enterococcus faecalis
TRGKFKMGQKGGISYSRVIQEPVGLGRQIWNKSNRVSDVGGIHQEDTPEDGVKLLPKSVNCVLLKMTKGKMNRIIQEIGGSI

SEQ ID NO: 4752 - protein, 104 aa, Enterococcus faecalis
  MISC_FEATURE (35)..(35): Amino acid 35 is Xaa wherein Xaa = any amino acid.
VVAKISKLRVIEDDERKNESHYSRDWRINLSIFQXTFYAKTKKGIVPSFIEAARPDVAIPLYELFNQQLEAEGIAVATGEFGADMQVSLTNDGPVTIVIDTREK

SEQ ID NO: 4753 - protein, 101 aa, Enterococcus faecalis
IILKIYEGTSKFHLSAKRELPWLRATSTVKVKDILEMDGRKAVPLRALIVEERVKSFKTRWYRVKETFTPLYVQHTRAFFIFRKKKMAHTFLWNDRRRERQ

SEQ ID NO: 4754 - protein, 438 aa, Enterococcus faecalis
KERKTMSYQKPKGTNDILPGTSEKWQFVEETARLIFKDYQYQEIRTPIFEHYEVISRSVGDTTDIVSKEMYDFYDKGDRHVTLRPEGTAPIVRAFVENKLYGPEYTKPYKTYYMGPMFRYERPQAGRLRQFHQIGVEAFGSENPALDVEIMAMALDFFKQLGIQQIKLVINSLGDKETRATYRQALIDYLEPHMAELSEDSQRRLHENPLRVLDSKDKKDKVIVAEAPSILDYLNEPSKAHFEAVTDMLDLLEIPYEIDSNMVRGLDYYTHTIFEIMSEAPKMGAQSTICAGGRYNGLVEELGGPDTPGFGFGMGIERVLLTMEAEEVVIPALSELDAYVVGIGSDTNVAALQLVQSIRNFGFSADRDYMNRKPKAQFKTADKLQAKLVLTIGENELNEGIVNVKSMATREEKAFPLSAIHDSFDEVYDEMMTKMIEE

SEQ ID NO: 4755 - protein, 590 aa, Enterococcus faecalis
EMEKRTTYCGNVSAEFIEKEVVLKGWVQKRRDLGGVIFIDLRDREGIVQVVFNPEKSKEAWEIADKCRSEYVIEVKGQVVYRDKEAINPKMKTGEFEVMATDITILNTAKTTPFTIEDDNNVNDELRMKYRYLDLRRPSMTNNIKLRHQVTKTIRHYLDNHDFLDIETPYLGKSTPEGARDYLVPSRVHAGHFYALPQSPQLFKQLLMGAGFDRYYQIVRCFRDEDLRGDRQPEFTQIDIETTFLTPEEIQTYTENMLAEVMKETKGIEISVPFPRMSYDEAMARYGSDKPDTRFAMELIDVAEVVKDVDFKVFQAALENGGHVKALNAKGAADKYSRKDMDNLGKYVSQFGAKGLAWLKVEEDGLKGPIAKFLTEVSDELIAATNAEVGDILMFGADKPEIVAAALGAVRTRLGKELGLIDESKFNFLWIVDWPLFEYDEEAGRYVSAHHPFTQPKAEDVDRLATDPASVYAEAYDVVLNGYELGGGSLRIHTRELQEKMFETLGFTKEEAQDQFGFLLDALDYGFPPHGGIALGLDRLAMLLAGEENIREVIAFPKNGKAIDPMNNAPSLVSPLQLFELNIDVTAIDE

SEQ ID NO: 4756 - protein, 170 aa, Enterococcus faecalis
VYKGAKQMTKIILTIGGSDPFSGGGIQTDLKTFENHQVFGLSTLTCLATAPKNHFQIHDLETSLVKEQLASIPAGSLDGIKIGLIHSEESMLQIVTFLKKHAGLPVVLDPVLAFKETTSVYEKRYMQLLIEKLFPFATIITPNLKEAELLIGRKLTTVEEVQQAAEELNL

SEQ ID NO: 4757 - protein, 135 aa, Enterococcus faecalis
FKRSRITHWQKINNRRRSPTSGGRVKSLGATTVVIKGVNRWLGQEACDFFYDGQQHIQLVKEKVMAHTIDGAGCSFASAIGANLVKGYPLIEAVDLAKTYVHEAIVSGVQLNAAFGSVWHEGLLAGGVADNDKKN

SEQ ID NO: 4758 - protein, 174 aa, Enterococcus faecalis
QEVWRIMTRKISLYAVITALTVAVSMVFIIPVPATNGFVTLADAGIYIASLLFGPIGGLTVGALSGGLIDLLSGYPQWLVFSLLIHGGQGWLAGHFFNKNKKMQTLGLLLASLLMISGYALATSWLYGVGAGIASLPGNIIQSLFGVIVALPLSQTLKRVLPKNGRLEERRMNK

SEQ ID NO: 4759 - protein, 561 aa, Enterococcus faecalis
SQALIYDRCWLSLLFQGKKKGILMQTSNKKFPLYALTTLGFTFLTLLVAASPNWFQQMDEAIYHIKWQLNAPLLTAVNLLAKTATIGPMLLFFLSLMVYLLRKKEKILAFWAVSNLLAVGFLGSVFKHVVGRARPNLGALADRSSASFPSGHSLLAMALVCTILIILTYLHVEKTKGIKIFLLTYLVLIVLGRLILRVHYPSDVIAGMLLSYSWINFSFQIVQRYLPAPEPEEAEVSTQRRRRHFRKRKSLFVVFSLTLLFLGTLSVSAYGVSMYRNLQKTANTMYKPRKSSTKSPDLAKGEPVSFLIMGIANDSKRKTDYRSNALMVVTVNNQLQKTTITSIPRDYYVEMAGTNGEYNKINAAHVFGGADMQIKTVENVLHIPINHYFSIDMDAMKDLGDAVGGVTVDNAFAFDAEGIHYPKGKQHLGGWEALQYARMRYEDPEGDYGRQRRQREVLIELTNKLLSFNSLLKYQEILDVIGEHGETDLSFDQMMAMLKKYTPALKTIETDQLKGYDYTGDGVTGIEGISYQLVEESERQRVENAIKEQMNLSTKDTEQSQ

SEQ ID NO: 4760 - protein, 438 aa, Enterococcus faecalis
KNEEVNSMLVNFTVKNLLSFKEEQTLSLQTGAYLRKYVNNRFEVKPKNYPEKLRLLKSAIVFGGNGSGKSNLVSGLNALKTLVLREQASINDALLYEPFALDPLTKQSPSVMTIEFINDSVLYRYSLANTAREVVKESLEIYDKTQDDFVYYFKRDGAESSVFPEKYQEYQTQIKSNSLVIHTLESKNDQHATNVVRWFANQLVIFDGSLRNIERLSNEKDKEKFLNFLKLADMNMVDLVPVKDKEEDYSKQEKLAAVLERIIQEKDPTIEIGRVKKSLYSLYSVYNQYDEMNQVVGQERIHYDLESSGTKKLIGLALNILFNPEEKVFVFDEFDDAFHQELSGTLLEAFNAMETNTQFILTSHELHLMDNQLRKDQIYFTDKNYRGASELYALYDFEADPKKGRGDITYYRRYLNGLFGGVPHIDRSEIVQAVKVKE

SEQ ID NO: 4761 - protein, 223 aa, Enterococcus faecalis
NRSGSEGKGVEVGMPKIKRVKKGKKLKPNVMIFCEGETEEAYLRLIKRKYSAVNIKSKLKVKTCRRQGEALVEYAVSCIRSMGKAERDNYDLFYVMYDKDEQTTESIENAVRCAQRHRPEIKTIFSNECFELWLLLHFEEVNRYMTRENLYGRLEKVLHLKDSYRNFKGAEVCKYLEEKVAIAFQNTNKNWLSPLEEMKINENPYTNFPKELCEMLAQKEVDF

SEQ ID NO: 4762 - protein, 247 aa, Enterococcus faecalis
TAPTKSESTVTDAKRAILDQTPDNTLIVADMQEMPRGRFGRPFFATPGKGIYMSMVLQPNQNFEEIAQYTVIMAVAVARAMDALAGVHTEIKWVNDLYLNGKKVCGILSEAMSNVETGQISNVIIGMGINFSITETEFPEDIRQKVTSLFPDGEPTATRNELVANIWNHFYQILDERSTKDFLEEYRQRSFVIGKDVAFTQNGQDFRGVATTINGNGELIVQLPDGTAKTLSSGEISLDQIGEWRRG

SEQ ID NO: 4763 - protein, 273 aa, Enterococcus faecalis
RYLLPGYRDVPQLVQHGLPLREAFLWSRGHVAGNYYAEDLNALPPQIIIGAQYIQAAGVALGLKKRGKENVVFTYTGDGGSSQGDFYEAINFAGAYQANGVFIIQNNGFAISTPREKQTAAKTLAQKAVAAGIPGIQVDGMDPLAVYAIAKEARDWSAAGNGPVLIETLTYRYGPHTLSGDDPTRYRSKEMDDEWVQKDPLTRFRKYLTDKGLWSEAKEEEIIEKTKEEIKVAIAEADKAPKQKVSDFLKNMFEVQPQTIKEQIAFYEAKESK

SEQ ID NO: 4764 - protein, 332 aa, Enterococcus faecalis
SEGVEIKMAQKTMIQAITDALALELEKDENVLIFGEDVGNNGGVFRATEGLQEKFGEDRVFDTPLAESGIGGLAFGLALQGYRPVPEIQFFGFVFEVFDEIVGQMARTRYRMGGTRNMPITVRAPFGGGVHTPELHSDNLEGLIAQSPGVRVVIPSNPYDAKGLLISSIRSNDPVVYLEHMKLYRSFREEVPDEAYEVPLDKAAVTREGTDVSIITYGAMVREAIKAADSLAKDNISAEIIDLRTVAPLDVETIINSVEKTGRVVVVQEAQKQAGVGAMVVSEISERAVLSLEAPIGRVSAPDTIFPFGQAENIWLPNAKDIEAKAREIVEF

SEQ ID NO: 4765 - protein, 540 aa, Enterococcus faecalis
KMAYQFKLPDIGEGIAEGEIVKWFVKPGDTINEDDTLLEVQNDKSVEEIPSPVTGTVKNIVVPEGTVANVGDVLIEIDAPGHEDNDAAPAAPAQEQTPAQPAAVPTTEAAGGFFQFKLPDIGEGIAEGEIVKWFVKAGDTINEDDSLLEVQNDKSVEEIPSPVTGTVKNIVVPEGTVANVGDVLVEIDAPGHNSAAPSVAAPATDAPKAEASAPAASTGVVAAADPNKRVLAMPSVRQYAREKDVDITQVTATGKGGRVIKADIDAFVSGGSQAAPATEAAATEAAPKAEAAAPKAAPKAFTSDLGEMETREKMTPTRKAIAKAMVNSKHTAPHVTLHDEVEVSKLWDHRKKFKDVAAANGTKLTFLPYVVKALTSTVQKFPILNASIDDAAQEIVYKNYFNIGIATDTDHGLYVPNVKNANTKSMFAIADEINEKAALAIEGKLTAQDMRDGTITISNIGSVGGGWFTPVINYPEVAILGVGTIAQEPVVNADGEIVVGRMMKLSLSFDHRIVDGATAQKAMNNIKRLLADPELLLMEG

SEQ ID NO: 4766 - protein, 394 aa, Enterococcus faecalis
QMVVGDFAIELDTVVIGAGPGGYVAAIRAAEMGQKVAIIEREYIGGVCLNVGCIPSKALIAAGHHYQEAQDSSTFGVTAKGVELDFAKTQDWKDNTVVKSLTGGVGMLLKKHKVEIIEGEAFFVDENTLRVIHPDSAQTYSFNNAIVATGSRPIEIPGFKFGGRVLDSTGGLNLKEVPKKFVIIGGGVIGAELGGAYANLGSEVTILEGSPSILPTYEKDMVKVVTDHFKKKNVTIVTSAMAKEAVDNGDSVTVKYEVNGKEESVEADYVMVTVGRRPNTDDLGLEQAGVEIGERGLIPVDNQGRTNVKNIFAIGDIVPGAALAHKASYEAKIAAEAISGKKVAVDYKAMPAVAFTDPELASVGMTVAEAKEAGIEAKGYKFPFAGNGRAILFR

SEQ ID NO: 4767 - protein, 104 aa, Enterococcus faecalis
LLQKQKKRESKQKVTNSHLLVTAVQSSLDKTEGFMRLVTTVEDNVIIGAQIAGVGASDMISELALAIESGMNAEDIALTIHPHPSLGEITMDTAELALGLPIHI

SEQ ID NO: 4768 - protein, 468 aa, Enterococcus faecalis
VKKCKNCRHVNRDTESFCEECGAPLMNESMHQEENQAQPSMNKGNESTPLRSKRSWIWAFLFVFIVLGAGSYFLGTHYFSKEQQISYFIEAIENGDAQELSKKMRTNESEFQVNPQSIKPLITYYQKNPTELKKLEKALLKDKKLHGLTIRETSQTAFFFHRYQFILTPVSVQLTTNQRGVTLAMNGREVGTSDSTTYQKELGPLAPGQYTFTATVKDSTGEPVITEEYRLLEEENYISSIPLDFKRMNFVVESNLPDADIYINDRKVGTLTNGSKTIGPLFWSKGMTIQLKKTINGEEIQTSKETIGENDFVEALSDNPTLQLNFPLASDYDARKALETFYQAFAKQVKSHTDSTEFAKKYLVGGENNPQFPSFIEALERLREKKSTDGSPDFEVTINTLQLDGKENYHVNYYLEAKNSKAKENGLRYEWINGLNDQIHLVKEPLKEGQLQFVSIDEQTLAWLEKIL

SEQ ID NO: 4769 - protein, 77 aa, Enterococcus faecalis
DVSLFMQSRLVPEKCIACGLCQVYAPNIFDYDDHGIVLFKDEPHARQQFIPENERENVLKAYRKCPTRAIEISKNEC

SEQ ID NO: 4770 - protein, 348 aa, Enterococcus faecalis
KRFTMEATFILALLSHGYKVRASTLYHLLKGKRTSSVLIYGFLYDCLRFIGWWPTISEQAYFQFLEKLSKAKQIQYHEETNEIQLTKEGQLFLKEHHFSLLDYPAIDLYRFGRSDRESWQLIQFAVQVTSYLSFEEKQYIPLLSTPIPQLYLKRWLQQDKKEQRVQSIKEELLRGFELLPEAESDYLVAQLSGYQQTGKVPQQLTSHKTALEQRLWHTQAVHHLLQLIMYGGNYPALQTLVWPYLEKNLNQSMQETQRLLTEGKTLQEIAEQRKIKPSTIHDHLLELAIQGQLQASVYLEKEAMLQNLAQTEQDPRLWVYRDWRAQEATLSYLDFRLYQIQQIWQEKE

SEQ ID NO: 4771 - protein, 67 aa, Enterococcus faecalis
KGGNAPKLGSNRTRSAAVGVSGLASARSDAFLFRFSVISNPTNLARKGVSVVDIRTRIIHSIWLRSV

SEQ ID NO: 4772 - protein, 330 aa, Enterococcus faecalis
VLLTLEQELFTQFGYAAFKPGQKEVITNLLDGMNTLAVLPTGTGKSLCYQFVGQKLEGLTVIVSPLLSLMEDQMRQLQRQGIKGAVALNSTLQYSEKRYILAKMFQYDYLFLSPEMLLQQEVLSVLQRQKIALFVVDEAHCVYQWGVDFRPEYSKLDLVQKQLDFPLTLALTATATPVVQHAIIKQLFSHGSYQEVLSSVNRKNIGLFVKETSEKEEVLLDYLSKTAGKIIIYCATRNKTEQISQLIQAKTSFKVAYYHGGLEASERSRLQEQFIDNQIDILCATNAFGMGIDKPDVRGVIHFDLPDSLENYRPELGRVGIETVPTTNLN

SEQ ID NO: 4773 - protein, 93 aa, Enterococcus faecalis
GLSMIRIGQGFDVHQLVPQRPLIIGGVTLPYEKGLLGHSDADVLTHAIIDAILGAAGLGDIGQLFPETDPQFKNANSVNLSKKVKETVDSPTG

SEQ ID NO: 4774 - protein, 388 aa, Enterococcus faecalis
INEEDGYMQKRIITLLMIIAGASLGISLFPMAWEMAKQGNNSWLNNNFTNGLIGAIIFFILSLGLAKYIVSAVKKIEAALNEMSLTYLLFGSIGAIIGLTIGVIISIPMYNLQIPVVNSLLPILVMIILGYLGFRMGTTRIEEWKKVFTPRQKKANTEDTEGQMLERKVEDNFHKYKILDTSVIIDGRIYDIAKTGFLEGVLLIPNFVLYELQYIADSGDSLKRVRGRRGLDILNALQKEEGISVEMYDGDFEDISEVDSKLIKLAKLLDGVVVTNDYNLNKVSEFQNVPVLNINALANAVKPVVIPGETMNVMVVKAGTERQQGVAYLDDGTMVVVEDGQHYMNEQIEVVVTSALQTAAGRMIFAKPAHAGRGINDRKDNHPKNDKN

SEQ ID NO: 4775 - protein, 409 aa, Enterococcus faecalis
NKQQIRRFYMAKKAKVQFECQSCGYVSPKYLGRCPNCGQWNSMVEEVIQDTSDRRARVSLTGKKTQPQRLSEVIPKKEPRVKTELVELNRVLGGGVVPGSLVLIGGDPGIGKSTLLLQVSQQLAATGGTVLYVSGEESAEQIKLRAERLGTVNETFYLYAETDMHEISRAIEKLEPDYVIIDSIQTMTQPDVTSVAGSVSQVRETTAELLKLAKTNGIAIFIVGHVTKEGSIAGPRMLEHMVDTVLYFEGDKHHTFRILRAVKNRFGSTNEIGIFEMQTHGLVEVMNPSQVFLEERLEGATGSSIVVAMEGSRPILVEIQALVTPTMFGNAKRTTTGLDFNRVSLIMAVLEKRAGLLLQNQDAYLKAAGGVKINEPAIDLALAISIASSYKEKGTSSSECFIGEMVLTG

SEQ ID NO: 4776 - protein, 163 aa, Enterococcus faecalis
GRMNMKQRGFEIISKYQEEGLSVPQRATKGAAGYDFQAAETVVVPSLWKLQQAGENPKPILVKTGIKAYMPDSEYLELVSRSSNPLKRFLLLANGVGVIDSDYYNNENNEGHIMFQFLNFGYEDVVIEKGERIGQGIFKPFLLADDDQVEAERTGGFGSSGQK

SEQ ID NO: 4777 - protein, 283 aa, Enterococcus faecalis
VSNFTVKRNEALMRNKLQQAKRIVIKVGTSSLIYPNGNINLKAIDQLAFTLSDLSNQGKEIILVSSGAIGVGLNKLNLSVRPTTIPEQQAVAAVGQAELMNIYNQRFSTYSQQMAQVLLTRDVIEYPESRNNVTNTFEQLLKMNIIPIVNENDTVAIEELDHLTKFGDNDQLSAIVCQIVQADLLVMLSDIDGFFSDNPTVNKEATLFSEINEINEDLFQLAGGKGSRFGTGGMSSKLKAAERVLANQQAMILANGKQPKIIFEILEGKDIGTLFIKGGHESD

SEQ ID NO: 4778 - protein, 160 aa, Enterococcus faecalis
KEKISVRYLLKEGMKVTDLKQLGQQAKEASYTLGLMDTRQKNTLLNKMAAAIEANAPRILQANALDLEQAATHGISETMQDRLRLTEERITAMAEGIRQVATLPDPIGEVDKMWRNEAGLLIGQQRVPLGVIGIIYESRPNVTTDAASLYLSFDHGDWPI

SEQ ID NO: 4779 - protein, 65 aa, Enterococcus faecalis
TCLTFSSRVPRTLCIKLFIRITGIGSRQNDGLWAPFVINQRGLLSCHTMVEYKHKKGDSHVFCFN

SEQ ID NO: 4780 - protein, 108 aa, Enterococcus faecalis
TEMDDFSVYAAANPLINEEQATNRAQQVASEIVGFENVVTDHPKSLGADDFADYLAVIPGIYGRVGSRNRENPATHFGHHHEQFDIDERALLLAAEYHVRYALNYLSE

SEQ ID NO: 4781 - protein, 362 aa, Enterococcus faecalis
LFLKEMRQKMNNKEMKARQEKIRNFSIIAHIDHGKSTLADRILEKTNTVSSREMQDQLLDSMDLERERGITIKLNAIELNYTAKDGEIYTFHLIDTPGHVDFTYEVSRSLAACEGAVLVVDAAQGIEAQTLANVYLALDNDLEILPVINKIDLPAADPERVRTEIEDVIGIDASEAVLASAKAGIGIEDILEQVVEYVPAPSGDIEAPLKALIFDSIYDSYRGVVLNIRVIDGVVRPGDKIQMMSNGKTFDVTEVGVFSPKPIARDYLMVGDVGYITASIKTVQDTRVGDTVTLADNPAAEALPGYRKMNPMVYCGLYPIDTSRYNDLREALEKLQLNDAALQFEPETSQALGPVSVVYTDN

SEQ ID NO: 4782 - protein, 441 aa, Enterococcus faecalis
RRFKALPFYSFGFERLTEFRKIWYTKNSKFIGDGKMDEQEFRKQLTLKPVEEEHIDQFNELLSYVFQVTEADIEESGFENKRAFIKSKQPILELSKVFGWFHENQLISQIAIYPCEVNIHGALYKMGGVTGVGTYPEYANHGLMKDLIQTALEEMRQDKQWISYLFPYNIPYYRRKGWEIMSDKLSFKIRDTQLPKTVPVPGMIERLAVDHPDVFDVYARFARQNHGALIRSAFNWEEYWRFENEEERTAAVYYGANQEPLGVLFYWVADEVFHIKEMFYLNQEARNGLWNFITAHFSMVYWVKGDIYKNEPLAFLLEDSQIKESIEPYYMARIVDVKAFLENFPFESTAKPFHFVVKDPVAEWNNGIFGLIWDENDQVTITDEPLGTAVHLDIQTLTCLVMNYRRPSYLHRIERIDTDKETLNSLERIFPDQEAYFSDYF

SEQ ID NO: 4783 - protein, 170 aa, Enterococcus faecalis
LFLNPWIGDRQMTKIYFAGPLFSQADLRYNAYLVEQIRQLDKTIDLYLPQENAAINDKSAYADSKMIALADTENVLASDLLVALLDGPTIDAGVASEIGVAYAKGIPVVALYTDSRQQGADNHQKLDALNEIAENQFHYLNLYTVGLIKLNGRVVSSEEDLLEEIKQRLS

SEQ ID NO: 4784 - protein, 111 aa, Enterococcus faecalis
FLNRIDDTILFTPLSLDNVKGIIGKMTAQLAHRLEQQEIVLEITDEAKTWIAENGYEPAYGARPLKRFITREVETPLAKEIVSGRVMPKTKVTISLLDNQLVFENEPIEEV

SEQ ID NO: 4785 - protein, 88 aa, Enterococcus faecalis
PSWLRGHMVILDEIEKAHPDVFNILLQVLDDGRLTDSKGRVVDFKNTVLIMTSNIGSQLLLEGVTPEGTIPEEVENQVMNILKGHFKP

SEQ ID NO: 4786 - protein, 103 aa, Enterococcus faecalis
KERFHLILLLKEVDFRQTKANARNVLKSFRRLERIAGRSLIDLKSPIITDMPKSQSHGNKAEDALVQLVDAEAERDAIVSALMALSLTSRQILHASIRPQVAG

SEQ ID NO: 4787 - protein, 89 aa, Enterococcus faecalis
LTYVVETTVFRQLFFRCELALSPNKVLLKSRLKIDNRSLAETCTTINCLPEVNVEKEEIYFINKIPKKVKVIIPLKNRFENTFYAKNIY

SEQ ID NO: 4788 - protein, 81 aa, Enterococcus faecalis
KRWSNCCNGLSKVVQYATTNRTRNYKFGGTSVVGKTGKQIKENYSVRKRVKKMLKFKEFNIQLFDVHIYIKRLSSFKTNKK

SEQ ID NO: 4789 - protein, 91 aa, Enterococcus faecalis
LKKGLFLRILRFTSLPLKYLLSSKKKRLEVKLERKYWDKKPDLDNYFKAVTDAAEGILYKNDGQIAVMVCQKLYSMRPRTELEITSLEEQV

SEQ ID NO: 4790 - protein, 76 aa, Enterococcus faecalis
ANKRILGGEMMRIILPIERKLQSRPRFARRGNYVQTYEDSAMGAYKQKAKPELIEKGAIFAHITFYIATPKISIKF

SEQ ID NO: 4791 - protein, 286 aa, Enterococcus faecalis
LVNEHRGYYAIIPAIVRYDNHLNGNAKLLYGELTALANEKGYCWATNQYFANLYNVSKRTIISWLKQLEERNYIKIQIFYKPNSKMVDRRHIYILPYPTDTEFYTPSEENFITYGKNHQEGDEENFTTPSEENFTENNTLINNTKNNTKNIYSVEQSSTMSELFEKVWKTYPKKTNKKKAKEQFLKKIKSDEDFERFKTGYKAYLKYIKLNDWYHPQELFRWIRDERFNDEYDLSETATQVRYSNNPVRQEKLPDWVNEPKKEEEKLSPEKQAELDRQIKEYLEGK

SEQ ID NO: 4792 - protein, 72 aa, Enterococcus faecalis
ISEVNSLVEELLEKYRQLTSSQKLFFELLAFVYIGSRNGKGIAIEAQTIKKVVNGEIKHKYVYTVVVDEEDN

SEQ ID NO: 4793 - protein, 145 aa, Enterococcus faecalis
RTKWIEEVLKYYYEAKSGVYFEHSKATRHEATEWISFLIEFILKNDVPLEKRYQYLLENNKWFYYCLKYRKCCICGKHADVCHIEVVGMGRNRQKINHETFTFYAGCRQHHQEEHQIGTKNFLNKYQIKPVKLNVEERKKLNIGG

SEQ ID NO: 4794 - protein, 72 aa, Enterococcus faecalis
MIGKIIKHKGNKLAIEFEDEINSNFLKLLANNDDNLVKVELLDNRQMSQKQNALSHVLIADIARWSYDEPNG

SEQ ID NO: 4795 - protein, 244 aa, Enterococcus faecalis
MTEATKTDFSKLNVYQKLAYVRQKAPYIQKSKRGQQYSYVGSSDVLSALNTVINQVGLILKPEIVAHQVRESQDEVWKADKVKKEPVAKKRTTYFTELELMMTWINIHNPSEIVACSWYSQGVDIEGEKGVGKALTYAEKYFLLKFFNIATDDDDPDKYQKEQLKNTTITERQIDMLNASISRVAELAGQEFEAVKSLAINDSDLNPKKAFEEYSAYDYGVISKLLAKWINFYESRQKVQEDKK

SEQ ID NO: 4796 - protein, 105 aa, Enterococcus faecalis
MNRREANALDRYLTEPTEKPHKETYEDDPVDTTDYFGNEIADEDGVFEITFAMKCLYTGQPVLTCKKIATQDTIVDLIEELGEENVYLIEYVSSGKRYKEGLLND

SEQ ID NO: 4797 - protein, 213 aa, Enterococcus faecalis
TKRGFCKKKPRFPFLEKGKCATMKRLNCRRKGIRVRILAIDTSNQTLSIAVCENQKILGSYTATVKRNHSLTLMPAIDYLMSQLNLAPTAIDRFVVAEGPGSYTGLRLGVTTAKTLAYTLKKELVGISSLQTLAANCVGQTGLIVPLFDARRKNVYAGAYRFVNGVWQNELPDQHISLRELLEQLKNEPNLFFVGEDVEKFTEEIAQSPQHGK

SEQ ID NO: 4798 - protein, 64 aa, Enterococcus faecalis
FSHTAILNVWLDVSIAKIRTRIPFLLQFSRFIVAHFPFSKKGKRGFFLQKPRFVHFLFLFNGCF

SEQ ID NO: 4799 - protein, 680 aa, Enterococcus faecalis
MERSNRNKKSSKKPLILGVSALVLIAAAGGGYYAYSQWQAKQELAEAKKTATTFLNVLSKQEFDKLPSVVQEASLKKNGYDTKSVVEKYQAIYSGIQAEGVKASDVQVKKAKDNQYTFTYKLSMSTPLGEMKDLSYQSSIAKKGDTYQIAWKPSLIFPDMSGNDKISIQVDNAKRGEIVDRNGSGLAINKVFDEVGVVPGKLGSGAEKTANIKAFSDKFGVSVDEINQKLSQGWVQADSFVPITVASEPVTELPTGAATKDTESRYYPLGEAAAQLIGYTGTITAEDIEKNPELSSTGVIGKTGLERAFDKELRGQDGGSLVILDDKENVKKALQTKEKKDGQTIKLTIDSGVQQQAFAIFDKRPGSAVITDPQKGDLLATVSSPSYDPNKMANGISQKEYDAYNNNKDLPFTARFATGYAPGSTFKTITGAIGLDAGTLKPDEELEINGLKWQKDKSWGGYFATRVKEASPVNLRTALVNSDNIYFAQQTLRMGEDKFRAGLNKFIFGEELDLPIAMTPAQISNEDKFNSEILLADTGYGQGQLLISPIQQATMYSVFQNNGTLVYPKLVLDKETKKKDNVISANAANTIATDLLGSVEDPSGYVYNMYNPNFSLAAKTGTAEIKDKQDTDGKENSFLLTLDRSNNKFLTMIMVENSGENGSATDISKPLIDYLEATIK

SEQ ID NO: 4800 - protein, 443 aa, Enterococcus faecalis
SIFSISSGFRWISLHSLCGILALTISFLLGGMNMGLIKAATSSVGGGLADQWLKVIEPDNMGDTTVMTKGVFVRKDDKRGSNRKGTDDVLTDGSVVHVYPNMMMLLVDGGKIIDYTAEEGYYTVKNDSAPSMFNGSLKDAIAETFSRFKFGGVTPQKQQVFYINLQEIKGIKFGTPAPLNYFDNFYNAELFLRAHGNYSIKITDPLLFYTNAIPKNQTQVDINDINEQYLAEFITALQAAINQMSADGQRISYVPSKSVELSKYMQTALDEDWRTNRGMEIVSVAVASISYTDDSTKLINMRNEGAMLSDPGVREGYVQGSLARGMEAAGKNEGGAMSGFMGVGMGMNANGNYFAQASQTNQQQMQEKQNQQNAQGATDTWTCPQCGTENTGKFCSNCGTPKPTNEKPKLEMKCSECSEIVDLSNGIPKFCPHCGKPFQGVPL

SEQ ID NO: 4801 - protein, 367 aa, Enterococcus faecalis
RKGSGTSLPFFFESDSCYLLTLLERTVAMETTFTHKCPNCGGPLLFNPKDQKFHCEYCLNIYTEEEVTRYEQQQHEAHLENPSTTTAEENLTFTAEEESSATQQTETTENETTADVGTMEIFNCPSCGAQIVTDATTAATYCYYCHNPVVLAGRLSGEFLPENVLPFTIEKDEAIEKFLAWTKKKWFIPRDFFSKNQIDKLTGVYFPYWVVDAEVDGQLQATGTSIRIWRVGDIEYTETKRFNVGRSGKLSFKELVKNALSKNVQQKMVEGVQPFLIDQAVPFKSQYLAGFQAEKRDIEYEAIKKHVQQELQDYSESLLRDSASGYTTLTNVRTDISLNQENNHYMLLPIWLVTYRSQEHTMSTKGD

SEQ ID NO: 4802 - protein, 228 aa, Enterococcus faecalis
  MISC_FEATURE (43)..(43): Amino acid 43 is Xaa wherein Xaa = any amino acid.
VPTNLMSLNLTWIFAYTMDGGPVGELQFETFNAAQAEITIQGXNVHPGTAKNTMINALQLGIDFHNALPADEVPEKTAGEEGFYHLAAFAGTPEEATMTYIIRDHNREIFEARKAKIKEIQQTLNAPFDEERIKVDLFDQYYNMREVIEKDMSIVEIAKQAMEELSIQPIIEPVRGGTDGSKISYLGIPTPNIFAGGENMHGRFEFVSLQAMEKATNVIIKIAELNAK

SEQ ID NO: 4803 - protein, 216 aa, Enterococcus faecalis
RLKECSFMYENLLPRFLRYVKTETRSDATSTTTPSTQTQVAFAQTLKKELEELGMSDVIYNETNGFVIATLPSNVEKDVRSIGFIAHMDTADFNAVNVSPQIVENYDGESTIPLDKEGKFTLNTKDFPNLKNYRGETLITTDGTTLLGADDKSGIAEIMTAMEYLINHPEIKHGTIRVAFGPDEEIGVGADKFDVAQFNVDLCLYNGWWASRRITI

SEQ ID NO: 4804 - protein, 378 aa, Enterococcus faecalis
LRRYWPMAVNGKTLIRRFNDYCPEWLAETGDPVGLHIGTLDKPIENVMVTLDVRPEVVAEAIEKQVDLIIAKHPPIFRPVKRLTTDNFQEKMYADLLKHDIAVYAAHTNMDIIDNGLNDWFCELLGIKQTTFLTKTHTVPYKKLAVFVPIDEAPQMREALGLAGAGSQGDYSKTSYSLIGTGRFTPTQGANPTIGEIGQESVVQEAKIEVIFPETKQEQVLAAMLQAHPYEEPAYDVYTIENQSKEFGLGRVGVLDKPVRFSYFVQQVKEAFQLDGLRVIAKDDTKMIQRVAICGGSGEKFYHDALRKQADVYITGDVYYHTAHDMIAEDLPVIDPGHYIEALCKPKLVELMNQWKQENEWAVSIFESEANTNPFRFK

SEQ ID NO: 4805 - protein, 261 aa, Enterococcus faecalis
IARMCKFSSSIDNGIISNGGIKNMNENQLSKRLATVGDLIPRGSRLADIGSDHAYLPVALMLENKLSFAVAGEVVEGPYQSAKTQVSKSNLTDKIIVRLANGLDAIEPEDQIDVISICGMGGTLIRDILEAGRKKNRLTGKERLVLQPNIGEPTLRRWLMANDYSIIDETIVEENRKLYEIIVAEKTEQSVSYTDQELLFGPVLIKKQGPVFTKKWQRELKQRKTVLAQLAKASGEHIEKQAKLQQDQQLIEEVLANGCER

SEQ ID NO: 4806 - protein, 339 aa, Enterococcus faecalis
VLAPLAEGQIYQLQVDERMRTRILKNHTATHLLHRALKDVLGEHANQAGSLVAPGHLRFDFTHFGQVTSEELARMEAIVNEKIWEAIPVVTIETDIDTAKNMGAMALFGEKYGKEVRVVNIGDYSIELCGGTHVANTEDIGIFKIVSESGIGAGVRRIEAVTSKEAYQLLQEEERQLKEIATLVKSPQLKEVVTKTEQLQQQLRDLQKENEQLAGKLANQQAGDIFKDVKDINGVRYIAAQVNVKDMNQLRQLADQWKQKELSDVLVLATAQDEKVSLLAAMTKDMNGKGLKAGDLIKAIAPKVGGGGGGRPDMAQAGGKNPAGIADALAEVENWLANA

SEQ ID NO: 4807 - protein, 509 aa, Enterococcus faecalis
  MISC_FEATURE (15)..(430): Amino acids 15 & 430 are Xaa wherein Xaa = any amino acid.
CLPVVKTYGLTLVLXTLKKYFDGSVVPENPRITNAQKSIRTNDIENVGKTARHHTMFEMLGNFSIGDYFKNEAIHWAWEFLTGAEWLAFDPEKLYVTVYPKDTEAKRIWRDEVGLSEDHIIDVEDNFWDIGAGPSGPDTEIFYDRGEEFLDIPEDDPENYPGGENERYLEIWNLVFSEFNHTPEDTYEPLPHKNIDTGMGLERVVSIIQDAPTNFETDLFMPIIHAVETLGTNVKYGDAPQTDVSFKVIADHIRALSFAIGDGALPSNEGRGYVLRRLLRRAVMHGKKLGINEAFLYKLVPVVGEIMVSYYPEVLQQKDFIEKVVRTEEERFHETINEGLSMLNEVIKEVKDAKGDTLDGKIIFKLYDTFGFPVELTEEVAEDEGLKVDHAGFETEMEAQRERARSARSKETSMGVQSALLTDIKVKSKXVGYTELTHDSELFVIIQGDALVNEASAGTAELIFAETPFYAEMGGQIADRGYVKNTAGEVVANVVDVKKAPNGQFLHKV

SEQ ID NO: 4808 - protein, 492 aa, Enterococcus faecalis
IVVWKLKQVRLLLQFSLSIKGGFHMKSTKPTVSFAESLGILIALLAILGYLIIGQKLTPHIPILFVFMLLLLYGKWKGFSWDEIHEGIVEGIKPGIIPIIIFLLIGVLVATWILSGTIPTIMVYGFKIISVKFFLPTVFVVCALVGVTVGSSFTTVSTMGIAFLGIGHILGFDNAMTAGAVVSGAFLGNNISPLSDTTNLAAGIGGVNLFEHILNMMYTVIPAFIISIVGYIFLGHQSGSADLQSVDAMVQTLHQGFWISPITLLPVAVLFLFAWKKVPAIPTLLVGSTVAVILAFINDHHLSLAKVSTILMSGYVADTGDQSIDTLLSRGGIESMLGSAALIILALGLGGLLIKFNIVATLIDKIKGYVNNPAKLIALTALSSVGINLLVGEQYLSIILPGETFKSSFTRLGIDKKYLTRTLADAGAAVNSLIPWGVSGTFIMGTLKVGALEYLPYAFFPLLCPIITVILGIFLKKQQGENKKAPGTNVEL

SEQ ID NO: 4809 - protein, 506 aa, Enterococcus faecalis
PILCLGKRQSNDCFTQRITVIHAPYPKSYKECTKLDKQQVKKIELGTFIGLGMALCATVRSIPTLAAVGWTLISYTIFAVLFFAGPIALISGELSTMLPQEGGSQLWVKTALGSKWGFVVAWLLWVQMFPGMVMVASTLGPLLGNTFGNVHLGENHWFVLGCILVIYWIITILNLKFDMAKVGGNIGVWLGVYIPVLVMFVLGLLSMIKVGLTPGGYLGAFSWSKVLPNLENMDTFKYLAGIAFIFVGIEMSSVYIPRLKDATKNYTKGVFISLIGLVLLNVINAMFVANIVPNGKMELSNITQPILLYCDVLGLPTIIGNIFSFMVFLGVLLQLSAWVTGPSKTIIQVARDGLLPPKFGFHRENKYGVSRNVVLTQSVVISLFALLYGVMDDVNAVFLTLTNATTIIYSIVYVLIAISLIKLRKSQPDTLRPYRIGKKGNGLAYLVAAMLIFSVIIVIFATLGTTTVTDAVLVALITIVMFVIPLIINRFKKASWATEVKEDLGE

SEQ ID NO: 4810 - protein, 608 aa, Enterococcus faecalis
LNGLFIGDKAENGQLYKDLLIDLVDEHLGWRQNYMPQDMPVISSQERTSESYEKTVNHMKDVLNEISSRMRTHSVPWHTAGRYWGHMNSETLMPSLLAYNFAMLWNGNNVAYESSPATSQMEEEVGHEFAHLMSYKNGWGHIVADGSLANLEGLWYARNIKSLPFAMKEVKPELVAGKSDWELLNMPTKEIMDLLESAEDEIDEIKAHSARSGKHLQAIGKWLVPQTKHYSWLKAADIIGIGLDQVIPVPVDHNYRMDINELEKIVRGLAEEQIPVLGVVGVVGSTEEGAVDSIDKIIALRDELMKDGIYYYVHVDAAYGGYGRAIFLDEDNNFIPYEDLQDVHEEYGVFKEKKEHISREVYDAYKAIELAESVTIDPHKMGYIPYSAGGIVIQDIRMRDVISYFATYVFEKGADIPALLGAYILEGSKAGATAASVWAAHHVLPLNVAGYGKLIGASIEGSHHFYNFLNDLTFKVGDKEIEVHTLTHPDFNMVDYVFKEKGNDDLVAMNKLNHDVYDYASYVKGNIYNNEFITSHTDFAIPDYGNSPLKFVNSLGFSDEEWNRAGKVTVLRAAVMTPYMNDKEEFDVYAPKIQAALQEKLEQIYDVK

SEQ ID NO: 4811 - protein, 75 aa, Enterococcus faecalis
AVISKKLSPINKMGDNFFVKAFLAKQISCYFASKSVILDKRQGGLFSGICNNIRRIRRKNYRQSSTSRLFDSKKL

SEQ ID NO: 4812 - protein, 113 aa, Enterococcus faecalis
TKDKEGYSVEYVTTLEELEEKITDNRLQAVFLTAKNCNVCTVDKPIVEKIATKYEFPTYIAEADKSPEIIGQLNAFSAPTIILYYEGKEIHRQAKIINFQEIEKRVRQVQENS

SEQ ID NO: 4813 - protein, 326 aa, Enterococcus faecalis
KGFPIVTFVFIYNILLIILYSFTSTFTLNLYLKNKQPIFLLLLFLMVIFICDNVIVYMTEFINSFATEYNQTFMTAPFLKTIIFICCNFAYLAIINTISGRPFKNYQFVWLFLIGLWMLAIPFSQNSALKVWLYYLPNQLFLIYLGCYALYQLRIDPLSALAKKYLRFIGWLSIGFGVAILLEDTFVIFNIDQYSDIVFKINNRNVSEDIYTIILSIAIIYFCNRDFPLSVLEKDAAKLEENQSDEPVLLAPFCDAYQLTQREREVLSLLLECKTNQDIANELFLSIGTVKTHIHNIFVKLEVNKRAEVFVSYQLFSQQQTEHLAR

SEQ ID NO: 4814 - protein, 87 aa, Enterococcus faecalis
EEHIMKRDYVTTETYTKEEMHYLVDLSLKIKEAIKNGYYPQLLKNKSLGMIFQQSSTRTRVSFETAMEQLCGHGEYLAPGQIQFRGT

SEQ ID NO: 4815 - protein, 266 aa, Enterococcus faecalis
HLVKFNLGGHETIEDTSRVLSRLVDILMARVERHHSIVDLANCATIPVINGMSDHNHPTQELGDLCTMVEHLPEGKKLEDCKVVFVGDATQVCFSLGLITTKMGMNFVHFGPEGFQLNEEHQAKLAKNCEVSGGSFLVTDDASSVEGADFLYTDVWYGLYEAELSEEERMKVFYPKYQVNQEMMDRAGANCKFMHCLPATRGEEVTDEVIDGKNSICFDEAENRLTSIRGLLVYLMNDYEAKNPYDLIKQAEAKKELEVFLDTQSI

SEQ ID NO: 4816 - protein, 470 aa, Enterococcus faecalis
ISGQFIKRGRVFMEGKKKFSLTSAILSVICVVFVAEAAAPVAAIGNSQFFWWIFLLIAFLLPYGLISSELGTTYIGEGGIYDWVTKAYGHRWGARVSWYYWINYPLWLASLAVMTPELLTTITGIKFSTPMMIIVELIFTWIVVWISFYPVSDSIWILNGAAVIKMVLAVLIGGLGLYVALTKGVANEFTLKSMLPTFDLRSLSFISVIIFNLLGFEVICTFADDMENPKKQIPQAIVAAGLVIAAIYIFSAFGIGVAIPTDQISTGSGMMDSFKLLTGSTEGWFIMLMAFLFLLTLFGNMISWSLGVNNTACYAAENGDMPKFFEKRSKKNDMPIGVALMNGIVASVVIVLAPILPNQDLFWAFFSLNVVLFLLSYIPVFPAFYKLRKIDPDTPRPFKVNGKPGFLKVLVVLPMIMIIISLIFTAVPLDFSPAALNEKLPITIGAIIFILFGEVIIYVKKIKKGTKENG

SEQ ID NO: 4817 - protein, 261 aa, Enterococcus faecalis
KKLRRERKKMAKRIVGSTPKQDGFRMPGEFEPQEKVWMIWPERPDNWRDGGKPVQEAFTNVAKAISQFTPMNVVVSQQQFQNCRRQLPPEITVYEMSNNDAWVRDCGPSFVINDHGEIRGVDWTFNAWGGLVDGLYFPWDQDDLVAQKICEIEHVDSYRTDDFVLEGGSFHVDGQGTVLTTEMCLLSEGRNPQLSKEAIEQKLCDYLNVEKVLWLGDGIDPEETNGHVDDVACFIAPGEVACIYTEDQNSPFYEAAQDAYP

SEQ ID NO: 4818 - protein, 375 aa, Enterococcus faecalis
LNRKGANNMKYQFPENFWWGSAASGPQTEGVFEGDGKGQNIWDFWYQEAPEKFFQQVGPDKTSQFYKKYQEDIQLMKETGHNSFRTSIQWSRLIPDPTTGKVNQTAVDFYNQVIDDLLEHGIEPFMNLYHFDMPMVLQEKGGWESREVVDLYVDFAKTCFELFGDRVKKWFTHNEPIVPVEGGYLYGWHYPDKVNLKEGIQVLYHEALASAKAIAVYHSMNLSGEIGIILNLTPTYPRDEHNEADVNAAKFVDGFFNRSFLDPAVKGHFPEDMVAWAKANDLLPETTPEDLAIIAENTVDLLGVNYYQPRRAKAKETPVETRPEGLLPEDFYDVYDMPGKKMNPYRGWEIYEKGIYDTLMNLKENYGNIRLHRPG

SEQ ID NO: 4819 - protein, 430 aa, Enterococcus faecalis
LGGITMDGFVQWMEKHFMPKASVIAAQRHLVAIRDAFVVTMPLMILGALAVLINNIPIPGYEDFLNKIFPMMYNDAPIWKSFGGNIWNGTFAIFAVLVAFLVAHNLVKSYGKDGIAAGTVSVASFFAVGGLEGMGATGLFIALIIALISGELFQRLSGNPKLVIKMPDGVPPAVAKSFAALLPAMITISLFSLITSILFALGIDNIVISFYEAVQQPFMGLANSYPSALLLAFITPFLWFFGLHGANMVDPLMQTINVPAIDANIKALEAGKAIPYIVNKPFFDSFVNLGGTGATLGLLIAIFIVGRRNKPYKVITNLSLAPGLFNINEPVMFGLPIVLNPIMFIPFILVPMVLVTVAYVATATGLVPAATFMPPWVTPPIIGGFLATKSIAGGVLAAVNLLISILIYMPFVKVATDQYLKQEAAAEAAE

SEQ ID NO: 4820 - protein, 119 aa, Enterococcus faecalis
WDHQTRAENGVEVMDGQQNLEAIMGLIMYGGNAKSDAMEAIAAAKSGDFELADKKIADAEESLVHAHHSQTGMLTEEAKGNNMQVTLLTVHSQDHLMTAIAFTDLAKEIIDLYRRIDNE

SEQ ID NO: 4821 - protein, 110 aa, Enterococcus faecalis
RKMAKKTIMLVCSAGMSTSLLVTKMQKAAEDRGMEADIFAVSASEADTNLENKEVNVLLLGPQVRFMKGQFEQKLQPKGIPLDVINMADYGMMNGEKVLDQAISLMGSSN

SEQ ID NO: 4822 - protein, 140 aa, Enterococcus faecalis
GETVMEITKTLTISADEFYTQLMNSVIFDIRKQTGKTLTRKQLRKFEYIKEYSKNSRAKIVIEEAVENKTYQFRTSTTKNDFSVRYELQPIDEKSCELRYTETMVSYGALQKLNDAVLGIFLSYFKKKQFYKMLKMMETA

SEQ ID NO: 4823 - protein, 72 aa, Enterococcus faecalis
SKKIGWMKMIRNGLFLCSIGFLIVLYSLNPSSLNYDLLSLTTGIFLIGLGGYLFFKGKKVAEEEATKDEVKR

SEQ ID NO: 4824 - protein, 443 aa, Enterococcus faecalis
NDSGQKNYERGVRMSSVVVVGTQWGDEGKGKITDFLSENAEVIARYQGGDNAGHTIKFDGVTYKLHLIPSGIFYKEKISVIGNGVVVNPKSLVKELAYLKENNVATDNLRISDRAHVILPYHIKLDQLQEDAKGENKIGTTIKGIGPAYMDKAARVGIRIADLLDKEIFAERLQINLEEKNRQFVKMFDSEAIEFDDIFEEYYEYGQQIKQYVTDTSVILNDALDAGKRVLFEGAQGVMLDIDQGTYPFVTSSNPVAGGVTIGSGVGPSKINKVVGVCKAYTSRVGDGPFPTELFDETGETIRRVGKEYGTTTGRPRRVGWFDSVVMRHSKRVSGITNLSLNSIDVLSGLETVKICTAYELDGELIYHYPASLKELSRCKPVYEELPGWSEDITGCKTLADLPANARNYVHRISELVGVRISTFSVGPDRNQTNVLESVWAQI

SEQ ID NO: 4825 - protein, 294 aa, Enterococcus faecalis
RGQLSVNYQLVTDSCCDLPYTYLKENQVPFISMNIQIDGKEYRDDLGETFDYQNFLTAIKNGSMPTTSQVNVGRYNEFFRPFVEQGLPVIYLAFSSGLSGSYQSALQSVEMSKEEYDNVEIHIIDTKATSLVQGMLVREAIRLQTDVHSLGEVVAYLEEQKMKLHSWVTVDDLKHLERGGRISKTAAALGGLMNIKPIIRVDAAGKLASVGKTRGRNKSLQKIAQETIQGIVEPMKQTLLIAYAGTKDDAEKVKELIEKEIEVNEILIYPLGPTITSHTGIGCIAVFSFGEKRK

SEQ ID NO: 4826 - protein, 72 aa, Enterococcus faecalis
RTELLLFLIKGSLIGQKQPMMNSWKTQKFKNKWTFYSVQIIKKIEKSLKNDFSIFYFLFSPKENTAIQPIPV

SEQ ID NO: 4827 - protein, 548 aa, Enterococcus faecalis
KRGKQLITVNDVSLQFPDRKLFEEVNIKFTPGNCYGLIGANGAGKSTFLKILSGEIQPTTGVVSMGPNERLATLKQNHFDYEDYTVLETVIMGHKRLYEVMKEKDAIYMKEDFSDEDGIRAAELEGEFAELDGWEAEPEAAVLLQGLNIPEELHDQKMSELTAGQKVKVLLAQSLFGKPDVLLLDEPTNGLDTRSINWLEEFLINFENTVIVVSHDRHFLNKVCTHMADLDFSKIKLYVGNYDFWLESSQLATKLQAQSNAKKEEQIKELQDFIARFSANASKSKQATSRKKMLDKITLDDIQPSSRRYPFVGFTPEREIGNDLLQVENVSVTIDGKKILDNISFNLTKDDKVAFIADSDITTTTLFKVIMGEITPDTGSVRWGVTTSQAYLPKDNSKDFEEPLTILDWLRQFAGKEEDDNTFLRSFLGRMLFSGEEVLKPVNVLSGGEKVRVMLSKLMLSKANVLVLDDPTNHLDLESITALNDGLMAFTGSILFASHDHQFIQTLANRIIAVSDKGVIDRAETTYDEFLENPEIQKQMDVLFSSDY

SEQ ID NO: 4828 - protein, 214 aa, Enterococcus faecalis
LVYRLKEPSKMKRIEKIYQYVKEQTKNLTPMTLTSDAGVTTQEISERLNIQRTNASKDLNQLVREGRLKKLSGRPVKYVAQVAFQHRPLTKPVKSYREKSMDHSTKTFIEPLVEPVVTTSKTPEVEDIFKKIIGSAGSMKTPVEQAKAAILYPPKGLNCLITGPTGSGKTYFAHAMFQFAKLNQIVAKEKEFVVFNCADYAHNPELLMSHLLGM

SEQ ID NO: 4829 - protein, 650 aa, Enterococcus faecalis
REMRNKQSLVFLASSLFLLILAPITSEAISNPSTNINEVNREIVEESANDQATSAPSHSETLEQEPSLETTTTTDNHPAETDQSTATLEPSEQQKDDGTSATESVIVEPQPRMLAAPYATSLPDDPNIIPIDKVFQEPIGNATSILEGGKLLQLNPAVKSQKGAIWSKKPISLLSDFTFKSYLYLGNEYANAGDGMTFTLTNDPRMSTTPQEVIGSPGMGIGAYSTKAGQPYVRNALSIEFDTYKNTGSSNRMDREISQDKGNGHLAFVTPKANNNNYTGEHSGVTVAPTYLSNGTWRMLTVHWNAATKALTYDLEGVGTNTYVVSDLNAQFGATTVYWGFTSSTGGKYQENALAMTQIPTNVTSQAALSVNGQEFSSAVEAVKNDQVRLRNTLNIDNDFIEDRQPQVSIDLPDELAYEENSLTIDGKKVAAKDLTQTGNHLTIALNDYLVLKKDMMIELKTTLQDNTPEKVLTMNFDYYEEGTLLQKSNNVTITIPKPTEKTVTVFYKDAEGKDIAPPKSVTGKIGAPYQEKPLDISGYVFTKDSGNAEGTMTEETKDIYFYYRLGELYFKEAPKQITFGTEKIRNQPLIKLGHPTEGLKVVDERNANNWRLQLKQTQPLTNDSIVMPDVFSFVSTAGRCPITNDSASA

SEQ ID NO: 4830 - protein, 263 aa, Enterococcus faecalis
RRKAMKKQFTGIVLCSTFAVAGWSLQAKAEEPKEYRSNGLVEFIPNVDPTEPVDPENPDPEKPVKPIDPTDPEGPNPGTQGPLSIDYASSFDFGKNRISNKDQVYFARAQQYQENQKETPNFVQISDNRGTNSGWSLTVTQKEQFKATKATLNSQLTGAQISLANPTVNSNAQNVVKPEATNKIALVPGTASLVAAAKQGTGAGTWATYWGKVEVVAERDETNTVHNVNVTKDVALSVPGSTPKDAVKYQTKLLWTLTDVPGI

SEQ ID NO: 4831 - protein, 252 aa, Enterococcus faecalis
NETREGVYLMKKTVLLTSATILLGVGFQAINASAAETFPKEYNTEGTITFEAGDNEITPPVDPENPDPTDPVDPIDPPGPGTGGALSIDYGSKFKFGTQKISTADQTYYAAPDEMKDGSKKPTYVQVTDKRGTLAGWKLTLSQPEQFKTATGEELVGAQLTFTKAEAASMVDEKYKPTEVSSTISLTPGVNNNLAMNAKKETGVGTWVYRFGSNEATNKEAVQLFVPGKSVKLAQQYSTKLVWALEDTPANN

SEQ ID NO: 4832 - protein, 129 aa, Enterococcus faecalis
CLLAGPVNVENGEGGIQMKIIKRFSLVCLGLLIIGLQTKSVMAEENNYESNGQASFYGTYVYENEKESNDVAYTQQSEEQGRNNLAASGQAVLPKTGESENPLYSLIGVSLLGIVIYLINKMKREKEFI

SEQ ID NO: 4833 - protein, 190 aa, Enterococcus faecalis
LVALNLEEDVDPLETTGKYLEPAEFKEALLDEDTVVIDARNDYEYDLGHFRGAVRPDIRSFRELPQWIRENKEKFMDKKIVTYCTGGIRCEKFSGWLLKEGFEDVAQLHGGIANYGKNPETRGELWDGKMYVFDDRISVEINHVDKKVIGKDWFDGTPCERYINCANPECNRQILTSEENEHKHLGGCSL

SEQ ID NO: 4834 - protein, 203 aa, Enterococcus faecalis
NPSLGAILMIQAYLLISDELNQGVAAGTPWKKGPVPTEFAIYGLGPVEIAISYFHEFKEVFEEILGFHVVAQEGNRYLLEVGQGGNGAQVVLVDDDTSSQAQQGYGEVHHVAFRLADRKSLGTWQALFDHLGLQNSGYVDRYYFESLYVRIGHILVELATDEPGFMGDEPYETLGEKLSLAPFLENRREYIESVIKPFNTKRA

SEQ ID NO: 4835 - protein, 204 aa, Enterococcus faecalis
GGKNMHSIFKKGHPEAPVFVLLHGTGGDETSLLPIAQELNKQATVLSIRGDVSENGMNRYFKRLAEGHYDLEDLEKRGEALHKFIQQAANEHQFSLDKIIFIGYSNGANIAIQLLLTHPDSYHQAVLYHPMFPVELTNQPDLTDTSVLLSLGEHDPIVPLPESMRVIQLFQNHGATVQEVWTQSHQLTYQEIKETQTWLAHLSS

SEQ ID NO: 4836 - protein, 323 aa, Enterococcus faecalis
KMKQMRGSWFMKAVVINQYGSKEVLEEAEVTLPELSEHQVLVKEYATSINPIDWKLRPGYLKQMFDWSFPIILGWDVAGVITEVGSQVTDWQVGDKVFSRPETTRFGTYAEVTIVDDHLLAKIPETISFEEAAAVPLAGLTAWQALFDHGHLKEGEIVLIHAGAGGVGTYAIQLAKEAGAHVITTASAKNHTLLKKIGADEVIDYHTTNFAEVLTDVDLVFDTMGGEVQKNSFAVLKPNTGRLVSIVGIEDKQLAAEKNISAESIWLQPNGEQLQKIADLMAAGKVKSIIGEVFPFSRQGIYDAHALSETHHAVGKIVVQMAE

SEQ ID NO: 4837 - protein, 427 aa, Enterococcus faecalis
MKFRDILKSASTNLMRNKGRTVLTIIAIFIGAFTIALTTGVNIGVNDYIDKQVGSVGGANQLFIQPKMEMNVGNGTEPSKYNPEKKTSTIQQQSMLAEKDIEKIKKISDVTSVEPMKSVAIDYIKGADKHKYVFSATSALDEMTIDLAAGRKVSQTSQDFEINLSPEYVKALGYTSSKAAVGETVQLGISSSLKGQEQVIEAKIVGVRNASVIQNGLSLMNKALIDKVVSINQADLPEHLKNQYAMIIAEVKKDSTPEQIKDIKKDLDKAGYLATTVEDEIGMIRNIINAITGVLTMFGAIALLAASFGIINTLYMSVQERTREIGLMKAMGLSNGKVFTIFSVEAALIGFFGSILGILGAVGVGNLVNRLATDSFLKALTGFKLIQFSLPSSLTIILVIMFIAFLAGTLPARRAAKLDPIESLRYE

SEQ ID NO: 4838 - protein, 236 aa, Enterococcus faecalis
TTKNEKWRGNMAVIEAKNIKKSYGKNETKFDALKGVDLKVEKGESVAIIGKSGSGKSTFMHILALLDQPTSGDIYLNGKNVTSIRKKVLNKTRNEEFGFVFQQFFMNAKDTVLNNVLLPLKIGGISGSKRKKMALDALKAVGLEDKVQNKANNLSGGQKQRVCIARALVNNPQIIFADEPTGNLDSATGKKIEELLFDLNKNKGITLIIVTHDPDLAARCDRQVHVRDGLIVGGDE

SEQ ID NO: 4839 - protein, 251 aa, Enterococcus faecalis
PIERRKSKMKFKTALRYRVIYQVRSLAIYFGFYALFGILFPLIGLLFSNDVNTVSSDAVIPCLVFMGILSFLGMNTDFKLFIQNGLSRWTIFLVNFVSNAILSLVGSLAVLVLIKVFSGNFISHFQLSMKLIDVYAQGNFFMSWLLFFILLMLSGSLGLLAGVFNDRIDGVKKLIVLLLLLMIPILLGTIAQLGGAPMRLRMLHILQTMVGYQSTGFTVLPLLLTISCFVGINLGLAYLLNKHREIKRVNA

SEQ ID NO: 4840 - protein, 285 aa, Enterococcus faecalis
RMSLRVESVSKKYHQKQALDNISITFEKETIYGLLGRNGAGKSTLLNIINNRSFATSGSVKLAGETVTDNEAALTHIYLMSEDNLFPPQLKIKDIFKTTEGFYGSFDWSLAEQMLSDFDLDGKKTFKKLSTGYRSIAKLIVALSVPCEYIFLDEPVLGLDANHRELFYTYLIETYQERPRTFVISTHLIEEIANLLEDIIIIDQGKLIRAESIETILKNGRIVSGPKEQVERYTQSLEILGMDTLGGAVTAYVYGDLPTEKAEVQIAPLNLQTYFVQLTNRKKEK

SEQ ID NO: 4841 - protein, 129 aa, Enterococcus faecalis
PFKRGVKMEFNFSGEKPLFQQVADQIAEGIFNGAYLEGEQIPSTTEISKSYQINPATVLKGMNLLVERQLIEKKRGIGMFVLPGAQERVRSARKEEFLNKEVLEVVAEAKKLGITAEQLKQLIERGYDA

SEQ ID NO: 4842 - protein, 262 aa, Enterococcus faecalis
RFFPKNLTKKMREKVAIQLILFYADFITREKDTHMLESYITVKQDGFSEIEIKKSRFICSVKRVTSEEEAKAFIAAIKKEHWKANHNCSAFVIGEKNDIQRSSDDGEPSGTAGVPMLEVLKKKELINVVAVVTRYFGGIKLGTGGLIRAYSHALSHTLDEIGLVIGKLQQELLITIAYPLLGKAQAFLEHSPYTLKETIYTESIQLICLVDEQATETFIAEMTDLLNGQLTIEKGATSYHELPFNEKGAQANDIWRRIRTDW

SEQ ID NO: 4843 - protein, 436 aa, Enterococcus faecalis
KMAQKEMQRMMQGAVVLTIASFIAKVLSAFYRVPFQNFVGDEGFYVYQQVYPIYGIAMTLALSGLPQFISKIVAEQPDIRSQKQVLRQLYPYVLWLAIACWAFFFFGSQEIAISMGDAALQPLMEVVSFTFLLVPILSFYRGNFQGHLLMVPSGISQVMEQFVRVGVILVAALSYHYFGGSIYQTGTVAMSGALAGGILAVLVLWYYNRKILSGSTEYLHQWKIMPQTTGLFKRLMIEGGLVSLYSAFLILFQLIDSFKVKNALMLFGLSDLAAKVDKGVYDRGQPLVQLGLVIALALSSTFLPGLTKYFMKKDRQQFLQVAKIFLRLTTTLASAASIGLMMLLPYMNFTLFKDYKGNDVLGVYVLSIAFIAIIQAYQSIEQSRNRFKGPLVAAGVGLLVKLLTTGFFTIRWGTLGASWSIFLGLPATLFVLVPAS

SEQ ID NO: 4844 - protein, 1192 aa, Enterococcus faecalis
INLMENSRKEGPCLNIIERISQTEIAKSWRSQLMTTGTRQLITGLSGSAKTLLMAGALQKTHQKIVIAVPNLYYANQLVDDFLNILPSEQVHLFPVDEVLSAEMAFSSPEARADRVSALNFLMTANAGIVVVPVAGLRKYLPTKETWQNAQLYWEIGTEVEPEILAQRLVLMGYERQAMVGKPGEFSIRGSIVDVYPLNAEYPVRVELFDVEIDSIRYFEADTQRSLENLEEVTISPMTDLVFSKADMNHGMTRLQDALEKRLATAKDQTETDFLEEYFGQLLSSWEQGIPTENAHYYTDFLYQQKTTLLDYLPENSLLFVDDYSRMMETEREIAREEAEWQTLKIEEMRVFSEQTFGVDFHDQLRKTARNTTFFSLFQKGMGNLRFQEVHNFQYRSMQQFFGQMPLLKAEVDRWQKQNQTVVVFVPTKERIQKVEELFQDFDIPSVVSNWDQLLDGHVQIVQGALQTGFELPKNKLVAITEKEIFHTTTKKRARRQTISNAERLKSYSDLKTGDYVVHANHGIGKYIGMETLEVDGVHQDYMTILYQNDDKLFIPVTQLNLIQKFVASESKTPKINKLGGSEWTKTKRKVASKIEDIADDLILLYATRESEKGYAFPPDDAYQKEFEEAFPYSETDDQLRSAAEIKHDMEKSRPMDRLLVGDVGFGKTEVALRAAFKAVSNNKQVAFLVPTTILAQQHYETIQERFEGFPVEIGLLSRFRTKKQQNETIEKIKHGQVDIVIGTHRLLSQDINFSDLGLLIIDEEQRFGVKHKERLKQLRSQVDVLTLTATPIPRTLHMSMLGVRDLSVIETPPENRYPIQTYVMENNPGAIREAIEREMARDGQVFYLYNRVDTIERKVEELQALVPDARIAYAHGQMTEVQLENTLFDFIEGQYDILVTTTIIETGVDIPNANTLFVENADYMGLSTLYQLRGRVGRSNRVAYAYFMYEQQKILNEVSEKRLEAIKDFTELGSGFKIAMRDLSIRGAGNLLGAQQHGFIDSVGFDMYSQMLSEAVARKQGKNIQDQKTSVEIDLGIDAYIPGTYITDERQKIEIYKRIRQLENMDMYEELEADLLDRFGEYPDEVAHLLTTGRIKMDGDRALLESIRKRDQKVKFVLSKIGTKTYSVEQLFEALSATSLKADLAVEKEQMTISLKLPKDCKEAVWIQEIAAFTTALRQEKYKHSQGTDSL

SEQ ID NO: 4845 - protein, 189 aa, Enterococcus faecalis
KMKVLVGLGNPGSKYKETKHNIGFITLDEIAYRQNVSFNNSNFEADIAEFFIGTEKVLLVKPLTFMNESGRSVGPLLTYFGVDEEDLIVIYDDLDLEIGKIRLRQKGSAGGHNGIKSLIAHLGTNVFPRIKIGIGRPSKNDTVIHHVLSTFPKETHEEMLLAVKKAADAALYACEGHTFVETMNQFNGK

SEQ ID NO: 4846 - protein, 379 aa, Enterococcus faecalis
PNAWNFKRSSFWKEKRKMIKKDYAQIKETLYTETLENGLKVYLLPKNDFQKTYGLFTTDYGSIDNTFVPIGQEEMIEVPDGIAHFLEHKMFEKEDGDVFQKFGQQGASANAFTSFTKTSYLFSTTDQVTQNLETLLDFVQSPYFTKETVEKEKGIIGQEIQMYLDDPNWRLFFGILGNLYPKHPLHIDIAGTVASIAEITAEDLYTCYNTFYHPSNMTLFVVGKMDPEALMAFIRENQAAKEFPAAQPIRRHFPEETAADIVKESAIEMTVTRAKVLVGLKGLDEVPTTGRDLMKYQVTVNLLLQLLFGNTSQNYLALYDEGLLDDSFSYDFNLDRSFHFADIGGDSEQPEFLAERIEAILLSATTSPEFSQFSPQRLT

SEQ ID NO: 4847 - protein, 427 aa, Enterococcus faecalis
RSDAAMSVQLVKGVNLHVIPTETYKAGVFLVRFNTRLNHETITKRTLLSSLMETNSLNYPNQVKLSERLAELYGASFGIGVSKKGNQHWFNISMNIVNDHYLQDSQVLAEAVDFLKEIIFAPNIQAGQFEAETFQREKENLKAYLESIVEDKQTYASLALQSVYFNQSEDQKIPSFGTVAALAEETAASLAAYYQKMLAEDQVDIFVLGDVNEAELVPLFKQLPFTPREEGKAAIFYNQPIRNVIEERTEREVLAQSKLNLAYNTDIYYGDSYYFALQVFNGIFGGFPHSKLFMNVREKEHLAYYASSSIDTFRGFMTVQTGIDGKNRNQVLRLISTELENIRLGKIRELEIEQTKAMLKNQYILALDNAGAWLEKEYLNELMPQTMLTAEEWIARINAVTIPEIQEVAKRLELQAIFFLEGETEND

SEQ ID NO: 4848 - protein, 181 aa, Enterococcus faecalis
HSFRCFLNDKSFSVQIFKKIRYTVFKVRREKRMIKEFKEFIMRGSVLDLAVGVVIGSAFTAIVTQVVEGLITPLISLIFVLTTGKKSADDALGALVYKVEGVEFNIGSVISALITFLITAFVLFLIVKAANKMKNRGKKEEAAEEEVVPTSEDYLKEIRDLLAAQTPPAETVKTDSTFTEK

SEQ ID NO: 4849 - protein, 243 aa, Enterococcus faecalis
RRRTQMKKKMMASLLVGSAVVGASLAPLSAQATTTGNTPVTAAFEGGTLPDGNGDANTVDPDPSGSNSNFDLLFIPREFNFGKLSISDDLTKPILNQRDPEATNGHTEMIGVGDVRGGKEGWHLTAQSNGLKLGTESLQGNIKVALITQLDLEYEATSNSYVALTTAVSTPEVRPQLAAPQNWTLDLGGEAQLMANAAAGQGQGLWQFSLFNTALNITTPANNIKAGAYTGSITWNLVAGPSV

SEQ ID NO: 4850 - protein, 154 aa, Enterococcus faecalis
GDLANPIPSKTDEGRAGNVESVGVGDIRGSKEGWHVTAQSTGMKLGEESLEGSITTGAMFLYPLIYNEETKTYDYQSADLADPVTKPETVDTTAFSIALGGDAVLLANATAGKGQGLWQFSFRPYLNITTPAYNIKAGAYTGNITWNLVAGPSI

SEQ ID NO: 4851 - protein, 189 aa, Enterococcus faecalis
KERLVLDYRTKEKKLKQLLNFIYDGITVTSDLLELSQQEFASLLESATKSGYIRGASITKTKMYPIIWTDDVELTEEGAEKIHPSEKNSQSIQTTNTFNFNSSGDYRGATFGNNNTVTNNWNNSLDELKEYIDALPPEEQQVGKELINIVETKDFKPNVLERFSDFLEKHPKIVTLARNAIVCERPHQR

SEQ ID NO: 4852 - protein, 206 aa, Enterococcus faecalis
ISLKQEELNLKLYELLLKIQNESDTLTNADISESDADFYGYLISKELVYNLKIEHYYSGPNIDASQAIITDKGYAFINQIGEADKPIKMNRENRYKQLQIFLKRLDDHDADLRTPNYRVQEIDYYDLIKYAIDSNLVKGIAIRYASNKPHLFLSQFARVTTEGYDVLDTPYPKNNTPGATISNTYNIYGGDQKGASFGSNNTTNNN

SEQ ID NO: 4853 - protein, 190 aa, Enterococcus faecalis
KSASDSEMSAFVSVSDSFWIFNSNSYNLRLSSSCFKLIYPLINFNYNRIFNLKNNIFGDELMKKIKSYTSIWAVEKVIYAINDFQLPFPVTFNQMAWFVLSLLFVIVFAHVPPLSVIKGAFLKYFGIPVAITWFMSQKTFDGKKPLGFLRSFISYHLRFKVTFAGKKVKEQKKRWDEPITLVRSVNYVPD

SEQ ID NO: 4854 - protein, 69 aa, Enterococcus faecalis
LIKDRKNPNGFLPSKVFCDINQVMATGMPKYFKNAPFITDSGGTWANTMTNSKDKTNQAIWLKVTGKGS

SEQ ID NO: 4855 - protein, 652 aa, Enterococcus faecalis
TMYPIKYIENNLVFNQEGECFAYYELIPYNYSFLSPEQKYQLHDNFRQLIAQNREGKIHALQIATESSIRATQERSKKEVIGRLKEIALQRIDLQTDALVSMIGDSQIDYRFFIGFKLIATDEEVNLKSLKKSFFSGFQEFIYEVNHHLMGDFVSLSNEEIRRYTKLEKLMESKLARRFKVRRVNPSDLTYLIEHIYGEKGTPFEEYAFQLPKKKLKSETLVKRYDLLRPSRCLIEEKPRYLRIEHENHESYVTYLTINTIVGEMEFPSSELFYYQQQQFAFPIDTSMNVEIVTNKKALAIVRNKKKELKDLDNHAYQSDNETNSNVLDALDSVDELETTLDQSKESMYKLSYVVRVRAESVDELKRRCDEVFDFYDDTNVKLVRPFGDTMGLHEEFLPASKRYMNDYIQYVTSDFLAGLGFGATQMLGELEGIYFGYNADTGRNVYLKPALASQGVKGSVTNALAAAFLGSLGGGKSFSNNLLVYYAVLFGGQAVIVDPKGERGGWKENLPEIADEINILNLTSKPENQGLLDPYVIMKKKKDSESLAIDILTFLTGISSRDGEKFPVLRKAIRTVTQSDQRGLLQVINELRKENSPVAENIADHIESFTDYDFAHLLFSDGSITQSISLDNQLNIIHVPDLVLPDAQTTS

SEQ ID NO: 4856 - protein, 130 aa, Enterococcus faecalis
IGGSTMVKRGDIYFADLSPVVGSEQGGVRPVLVVQNNLGNHFSPTIIVAAITAKMAKPKLPTHIGINSDETGIEKDSVILLEQIRTIDKGRLKEKVCHLRLDIMEEVDRALGISVGLSSDSAPAKANSAT

SEQ ID NO: 4857 - protein, 403 aa, Enterococcus faecalis
SVCLDYAHRNYGDCTNCFRKGIIEATKKEGCTMVVGWHRPTRLHIDTQAITENVQKECQRLPEGTALFAVVKANGYGHGAVESAKAAKKGGATGFCVALLDEAIELREAGVQDPILILSVVDLAYVPLLIQYDLSVTVATQEWLEAALQQLTPESNTPLRVHLKVDTGMGRIGFLTPEETKQAVRFVQSHKEFLWEGIFTHFSTADEIDTSYFEKQAGRFKAVLAVLEELPRYVHVSNSATALWHPDVPGNMIRYGVAMYGLNPSGNKLAPSYALKPALRLTSELIHVKRLAAGEGIGYGETYVTEAEEWIGTVPIGYADGWLRHLQGFTVLVNGKRCEIVGRVCMDQCMIRLAEEVPVGSVVTLVGKDGNEENTLQMVAEKLETIHYEVACTFSQRIPREYN

SEQ ID NO: 4858 - protein, 86 aa, Enterococcus faecalis
KSQPIFSLATGLDSNHSFATTKTEAFQSNFPVENLDNFGVFLFLYHFDAFFTFFKFFYLTIIYQKRASVPFIDGTLALLIIWRFRE

SEQ ID NO: 4859 - protein, 419 aa, Enterococcus faecalis
KIGVQTVNGGADIGRQIRGLKDRPHIVVGTPGRLLDHINRRTLKLETVETLVLDEADEMLNMGFLEDIEKIISQVPEQRQTLLFSATMPPAIKNIGVKFMKQPEHVKIKAKEMTADLIDQYYVRSKDFEKFDIMTRLLDVQTPELTIVFGRTKRRVDELARGLEARGYKAEGIHGDLSQQKRMSVLRSFKNGNLDILVATDVAARGLDISGVTHVYNYDIPQDPESYVHRIGRTGRAGKGGMSVTFVTPNEMGYLHVIENLTKKRMTPLRPPTEKEAFKGQLSAAVETIESDLEENGLDKYLESAEALLEKYSATDLAALLLKTVAKDPADAVPVKITPERPLPSNKKGFNKNGRGGGGGNNRNRNRGGNGKGGSYRGNKNHKDGDRNYKNSDRKNKDQRGGKRHNDKKRGFVIRENAK

SEQ ID NO: 4860 - protein, 139 aa, Enterococcus faecalis
QLKVKTPETRKKSFFPKQNLGGYHLKFKELGLAPELLSAVERAGFEEATPIQSETIPLALAGKDVIGQAQTGTGKTAAFGLPMLNKIDADNRVIQGLVIAPTRELAIQTQEELFRLGRDKRLASKPLTGGLISVAKSVD

SEQ ID NO: 4861 - protein, 72 aa, Enterococcus faecalis
KEIHYSVPTISSFLISPKNSPYGIRKAKRGRSASHLLLNIEIDLFYLLRFNFSRHLPAIGHSIIESHFQQVL

SEQ ID NO: 4862 - protein, 483 aa, Enterococcus faecalis
EEKITQDWDMTRLWHVPVPVSEEQNIMKLTFWEVAQAVEASNDWQQWPDFPLTGIEFDSRKIVKGNLFVPLQGENDGHRFIESAMANGCQAAFWGQDLVDAPQQLPVLHVTDPLVAMQKLATYYLNKMQPNVIAVTGSNGKTTTKDLIAAVLSEKFVTYKTQGNYNNQIGLPYTILHMPDETEKLILEMGMDHAQEISFLSNLAQPEVAAITMIGEAHVENLGSRAGIAQAKMEIVDGLAKDGSLFVPSDEPLLEPLVEKVTQQVITFGFSQESQLQGIVTNEAKEQTSFKISDTQMTFTIPVPGTYNVTNALIAIGIGRYFQLTDSEIQKGLATAELTKNRTEWLKAANGAEILSDVYNANPTAMGLVLDSFSKMSKVGKRIAVLGDMLELGPDSAAMHQAMAQHLAPDAIEEVFLYGSEMAYLADKLQETYAPANIHSFKKEEKNELIEAVKKVLQPEDMVVLKGSNGMGLREVIDALLEK

SEQ ID NO: 4863 - protein, 502 aa, Enterococcus faecalis
PSQIYPILGGGKMFQNNLSLKRYKRLRTKYFTQINEEVFDPNDFITEMKPFFDDRERKYKAYTSEQNEIDRRPKPNTKIIKVNNKLHAGLYNTIVDQAADHFTGIPIKWDYDITEQRRSIMQRAKDLFLNNTLKNTKTPKEFERLTELVNDMRFAMLDSDTARFQGACGVAFRLLEPVKTKEGWQLWASNIEPWKAEKYENADIFIREKYDTHQKKFFEEMKVITKERIRIYSRYIEFNLVSVSGTFKLIEEVENPLETFYLSEFKNNTNRYCDFEVAEELSDAFDRSLSDQQNEVEQFKLAYMAISGSILDEEKAQRMMEQLGILNLPDPQAKVGYVTKDINKDFNEYHLNQLKKMFYTITKSIDFNDEVFKSNASGEARKWQIIALEAKTNTKEQYFREGLKEVAETMAAFIKFNDKLDLDVSKIVFTFSRSLPTDIGYLADALPKLSPFLSKRTIINQIPFAKDPDYEMDLMNLEQGQDYPSGDYKLGGADNDEEESNS

SEQ ID NO: 4864 - protein, 638 aa, Enterococcus faecalis
VVRIMTKKKATVSERYWEKRRELEDKARLKLEKKTLSELESVFERALVKIQRQLLAQADLHGITQSEMLEDFSKRDQEKYRKYIEKNYEKLMESDEVYKQFIDEYFPSFDYAKVNRLLQLRADIFSTIAGEAIASDVNGKFNNDLENITKRIYNSNSNALIQLLGGSAPGLTKNELENIMNYPWSGKTFSSRLWGNISTLEQRLSNSIINSLASGEGVVEALRTMKNDGVISGMFKLEQGKFNRSIENLVRTEYSHFAVEGVRKSLKDIGVKQTQSWSAEDERVCSICGGRHGKEIKDDWHPPYHGRCRCTEIPIIPEISDDIDKLYEEMFGDLLDEFASKQWGIKLNHPKVSATKLDLKSVLDKTNMQEALGKENYSNFLDHLDGITDQRVLNLINVIGHKLEFKDIKEVRAFAQGKSIQLSQKSFDGDRGVNPYQTVYHEIGHALDHLGLEVLTGKNTMPTGKLIKRKLGRRTTFIEEHITHASSLSEYNIKEALERDFWKYVNGDLPSYNDLGNRPRNADKKKAYDDLRAEIYKKNTENLQKTRERLSKIVRENPNSVSAISDMIESIGSLGDYPLGFGHGKRYWQTTGSTETEFFAHMTEVVANDKSRELMKEIFPTAVSKWEKLVDDILKAVK

SEQ ID NO: 4865 - protein, 76 aa, Enterococcus faecalis
VFSCEDGAWSIIDDAVKKYEQHFHDEFPIYEYIDVTKSDDFDFSILGAKKLAKFIDEHIKENKSVHVPSDYHSRLY

SEQ ID NO: 4866 - protein, 111 aa, Enterococcus faecalis
IGGEIMKGLFEAVLNLEVTNGTEKAYKKAFEQENERYLTKHTLRDGNGNIVKDELKSVWGGNYCHVDILYSLPGKKSKLTISIVSRTLQNVKDAVTDYQMLGAELVHKNWK

SEQ ID NO: 4867 - protein, 223 aa, Enterococcus faecalis
SNAGRLVESWGERRNKMKPNLLPMNLQMFAEEDGGTNFTFDDFKAFVESNEEAQKFVQSQSQSAADKQLEAWKQNNLEKIKETTIKEYEESKKNKTPEQIKLEELQAEFEAEKALRVTSDNKAFVAEKIAGLDWDGDLKDSISQFMLNNLVSSDTEFTKKAVEGFTELLEAINDKHAEAIKNVEMTKAFGNKSQQTNMGTGNQTKSFENPEVALGQKLQAFID

SEQ ID NO: 4868 - protein, 166 aa, Enterococcus faecalis
DKNYKLLSIRRKLQMKKSSLNNLEYLDISQEVNALQVPNTPFLSYLLGAGKVEAAKSTEIKWREYGMNNDDSSAQLEGGEYADAESDRTWFNNYTEIFRKSTSVSGTLDAINVDGVGNELNSQVALRATEMKIDLNRTLIVGVKADESGSKGRQMNGILNLNNSTK

SEQ ID NO: 4869 - protein, 188 aa, Enterococcus faecalis
  MISC_FEATURE (21)..(21): Amino acid 21 is Xaa wherein Xaa = any amino acid.
ATRGEDLRVIKTNKWQNYGRXKKIVLVEKISIGYIPQQVASFNAGFPSTVIELVRSGRFPRNRWFKPLTKKDHLHVEKALKSVDMWEMRHKRIGELSGGQKQRISLARVFATDPDLFILDEPTTGMDEQSRNEFYQLLQHSAHEHGKAILMITHDHEDIKTYVDRQIRLVRKEDSKWRCFHMSEESYT

SEQ ID NO: 4870 - protein, 283 aa, Enterococcus faecalis
GVNRMAEMLSYAFMQKAFLAALFISVIAPMLGVFLVIRRQSLMADTLSHVSLAGVALGFFFNWNPNLMTLIVVIVAAIILEYLRMIYSTYSEISIAILMSGGLALALVLMNLTGGNSAASIQSYLFGSIVTITWDQVVMLAILFVVLVLLFMLFKRPMYVLTFDEDTAHVDGLPIHWMSMLFNVITGVAIAVMIPIAGALLISAIMVLPAAIGMRIGKGFNTVIIISVFMGLIGMLTGLTSSYYLETPPSASITLIFIGLFLLVNIYRRVVVMVQRKQKMQRN

SEQ ID NO: 4871 - protein, 133 aa, Enterococcus faecalis
KGVTNLKIRRSERLIDMTQYLLDHPHTLVSLTYFADRYQSAKSSISEELAIVKKTFKERGTGILETIPGAAGGVRFIPEIPYDEAEQLIMDLCDRLSEQDRLLPGGYVYLSDLLGEPNLLRQVGRIIASKYLG

SEQ ID NO: 4872 - protein, 144 aa, Enterococcus faecalis
QIDAVMTVATKGVPIAQAVSYYLNVPFVIVRRDSKITEGSTVSVNYVSGSSERIEKMELSKRSLKRGSKVLVVDDFMKGGGTVNGMKSMIEEFEAELVGITVFAESKFNGRRAIDDYTSLLYVEDVDTQTKTISVVPGNYFTEK

SEQ ID NO: 4873 - protein, 463 aa, Enterococcus faecalis
FEVANVENRYAIILAAGKGTRMKSKLYKVLHPVAGKPMVEHILDQVEQTEPTEIVTIVGHGAEMIKSHLGERSQYALQAEQLGTGHAVMQAQELLGGKQGTTLVITGDTPLLTAETLKNLFDYHQGKNASATILTAHAEDPTGYGRIIRDHVGIVERIVEQKDASEEEARVQEINTGTFCFDNESLFEALAKTDTNNTQGEYYLTDIIEILKKEGKAVAAYQMADFDEAMGVNDRVALSTANKIMHRRLNEMHMRNGVTFIDPDTTYIDEGVVIGSDTVIEAGVTIKGKTVIGEDCLIGAHSEIVDSHIGNQVVVKQSVIEESVVHEGADVGPYAHLRPKADVGANVHIGNFVEVKNATIDEGTKVGHLTYVGDATLGKDINVGCGVVFVNYDGKNKHQTIVGDHAFIGSATNIVAPVTIGDHAVTAAGSTITEDVPSEDLAIARARQVNKEGYAKKLPYMKD

SEQ ID NO: 4874 - protein, 696 aa, Enterococcus faecalis
  MISC_FEATURE (688)..(688): Amino acid 688 is Xaa wherein Xaa = any amino acid.
NTRRKFVKKLSFKKVKWGMHFLMAVALIAPSVTSTAYAVETTSQQSSEAVTSTTDSSRKQEPVITQETTDIKQEAPNQATSDSVKQSQETTAPTETTNLETSIAEKEETSTPQKITILGTSDVHGQLWNWSYEDDKELPVGLSQVSTVVNQVRAQNPAGTVLIDNGDNIQGTILTDDLYNKAPLVNEKTHPMITAMNVMKYDAMVLGNHEFNFGLPLIKKIQQEATFPILSANTYNKEDGLRFVEGTTTKELDFNQDGQPDLKVGIIGLTIPHIPLWDGPRVTSLNFLPLKEEAEKAVTELKANDQADIIVASIHAGQQNSDPAASADQVIENVAGIDAYILGHDHLSFTKQGAAPNGKTVPVGGPKDTGTEVVKIDLSVAKNADKWEVQEGTATIVPTTNVPADEAVKAATKEYHEKTRAFIQEEIGTATADFLPKQEIKGIPEAQLQPTAMISLINNVQKEVTGAQLSAAALFKYDSKLPAGKISYATIFDIYKYPNTLVSVPINGENLLKYLEKQGAYYNQTQPDDLTISFNPNIRVYNYDMISGVDYKIDISKPVGERIVDAKIDGQPLDPAKEYTIAMNNYRYGGLASQGIQVGEPIKNSDPETLRRMIVDYIKKKGTLDPEQEIERNWSIIGNNFDEKWRAKAIELVNDGTLQIPTSPDGRTPNAAAITKQDVRNAGLDLNXAYTIMHTK

SEQ ID NO: 4875 - protein, 259 aa, Enterococcus faecalis
LVYLKKQIGSKANVLRCSFMENRGILFDKDGTCIRFDTLWQAGLQACFETLSMLAPHHSAEIKKILAIQEQRFLQKHLLDEVLYQELYQELAQFEELVEQGISSRWLEQFFYDYLRKNLKKIEPIGDLKQLFLELKRKNYKIGLATSDTLPATMLIMEYLGLTEMFDFIATGDRYLPKPDADMLQAFCQSCQLKATEVIMVGDSLVDVFMGTCHGKAGIGVLTGNCQSTDFEKFEVAYFRDIHEIPYQELWDVHHGVGL

SEQ ID NO: 4876 - protein, 86 aa, Enterococcus faecalis
LKKSRESEWLIMEETVFFNLGNALASKRDQKELIKEAQIAKDTRKIPGKLIIVEDEENGTHILFELADQTEPSAETKEFKVKKVID

SEQ ID NO: 4877 - protein, 222 aa, Enterococcus faecalis
RKEGTFMKKFCLSYSSGKDCLLAMDRLVQAGNQPVALVTTLSDEINRSWFHGIPISVLEAAAEALDLPLVISHNNETNYTEKVVEALQETKKLGAETVCFGDIDIEQNGAWDRQVALSAGLEPQLPLWQENREALVKEFLAKGYTAIIKTVSKEAGIPIKFLGEPLNETFITYLKEHQLDICGENGEYHTLVIDGPLFKKRLNYYTSGIYESPYAYSLIIDA

SEQ ID NO: 4878 - protein, 64 aa, Enterococcus faecalis
SFFQKTQLSFAVFFSSCYKEIVGSIYSLLYKSILILDSRRKTAVYLSGKIMNSSASGQLTSFML

SEQ ID NO: 4879 - protein, 271 aa, Enterococcus faecalis
IMREVKLILAEQFSYLGVAQRIAKYSNKALYQSHILGNLWQILSPLIQLGVYYFAFGIALGGARTVKGGVSYIAWLMVGLSTWIFLSTVTKQASSSVYMQVGMVSRMKFPISILPMVKIFSELPSYFAFTTLAAIVSISTGEKISIYWIQLPYYIVAMIIFLYSFSLINSTIAALIRDYQIFLNSIIQVLMYMSGVFWDLSTKNLPSWLSKILMLNPYAYIINGFRDTFFYKRWFFEDKPQLVVFWLTTLVIFIVGAHLHVKFRSKFVDYM

SEQ ID NO: 4880 - protein, 468 aa, Enterococcus faecalis
KQSLKNLVKWPTSERLDSEEQMEKELKVRTKLLTKEYSLAQTRIDKLKTLFSVFQNKVPTFWALKGVSLDVYSGETIGIIGLNGSGKSTLSNIISGITPQTSGELEINGEVSIISIGAGLNNNLTGRENIRMKCLMLGEKNKEIDAKIDDIIEFSELGVFIDQPVKTYSSGMRAKLGFSIAVHQNPDILVIDEALSVGDQTFYNKGLKKMLAFKEQGKTIFFVSHSIQQVEQICDRVAWMHYGDLRAFGETKHILKEYRAFLHRYNHFTEPQKESYQRDGKAKQRNFSLEQLQETILEKANQQVGSRRTTKEVIKFTTKNKIGDKMTLGTKSLLILLLCMIFYVSLTFVKGISLTTAFIHPAETIQRIFVPEKVAGKDTNAVKTTKTKPASTKESRQQEEVQPSPTNVPENNNSEQAVSTYTVEVGDSVSLIAENHGLTIEQLQTLNPEIIEVPIYPGQVLKLKEVTE

SEQ ID NO: 4881 - protein, 339 aa, Enterococcus faecalis
  MISC_FEATURE (12)..(12): Amino acid 12 is Xaa wherein Xaa = any amino acid.
YWWPLCINIKQXGINVQDYVAHIFHTDNKEVCFYVIQLTEFNGDINQVLANYKGELYNLPFNMNTFYQMWGVKTPAEAQAKISEQREAAGIKGAPKNLEEQAIRLIGTDIYEKLIKGYTEKQWGRKATELPSFIIRRLPTRFTFDNNYFNHRYQGVPVDGYTAMFDKLLESELIDIQLNKDFLAEKETYLSEFPKIVYTGMIDAFFDYSYGELEYRSVRFENETVDSNNAQGNAVINYTDAETPYTRIMEWRHFDQKADENKTILTKEYPQDWDRSKEAYYPVNDEKNSLLFRKYKEKANAQEKVIFGGRLANYQYYDMDQVFGAALKAVAKEFGEMAN

SEQ ID NO: 4882 - protein, 278 aa, Enterococcus faecalis
YSLFRKEERGEPFMFLGFNEMKYSKGRYVLVVLVMVLIAWLIFILSGLANGLAQGNRLAVDQWQANQVVLSKEANSNLNVSVLDENVKETISGGKIAPIGQQSLAIRPADDKKAELTNVSLFGIEKESFLMPKVIEGNAFTDKNQVIASETLKNQGFKIGDKLTAGKYDEQLEIVGFISKSSYNIVPVIYTSLDTWRSIKYGDNPAMAKMVNGFIVRSKDNTEVKTTNKDSQVLSISDFIEKLPGYSAQNLTLDGMIYFLIVIAAFIIGIFIFVMTLQ

SEQ ID NO: 4883 - protein, 204 aa, Enterococcus faecalis
KAAGGEKTMEKPNKRKADLERTRQIILSVASELFMTKGFKNTSTREIALKANITQPNLYHHFKNKKELYLAVIEELTSRVQEELVPIVSGNASVEEKLYQLIKVLLDEHPTNLFLMLNDMFQEMGPDYNRTLYQIFKKTYINNIAAIFESEPETNCLQDGISVHDATRFILYNVSALLSIEKTYSEKQWMTMFKNLFNLSYMAF

SEQ ID NO: 4884 - protein, 355 aa, Enterococcus faecalis
SKMKKFVPLRIKVKCIQDYFSPMMQGMSLVNTAIVIIFGGWLAINGSVDRAAALGLVVMFVQYSQQYYQPLMQISSGYSMIQLAVTGARRLNEMFDEPDEIRPENGEKLEEINKAVALNHVVFGYNPETPVLKDVSIHVDKGEMVALVGPTGSGKTTIMNLMNRFYDVNEGAVTFDGVDIREMDLDSLRSHVGIVLQESVLFSGTIRENIAFGKPEATDEEIVQAAKQANIHEFIVNLEQGYDTEITEENNLFSTGQKQLVSIARTIITNPELLILDEATSNVDTVTEAKIQKAMDEAIKGRTSFVIAHRLKTILNADRIIVLRDGEVIEEGNHHELVEQDGFYAELYKNQFVFE

SEQ ID NO: 4885 - protein, 305 aa, Enterococcus faecalis
RISSYEPRVSRNLRNSKRKGGSLMTDLIKASKFFYHYLKRYKVSFLFIFLAIFAATYLQVKAPQFVGEAIQELAKYAVNVMQGKDDKSAFVSVIWKLLIFYVLTSAASFIYSILFTQVVGKSTNRMRIGLFNKLEKLTIRFFDSHQDGEILSRFTSDLDNIQNSLNQALLQVLTNIALLVGVLIMMFRQNVELAWATIASTPIAILIAVFVISKARKYVDLQQDEVGKLNGYMDEKISGQRVIITNGLQEETIDGFLEQNEKVRAATYKGQVYSGLLFPNDARNVISQYGDCYYLWWLVSNQWLC

SEQ ID NO: 4886 - protein, 500 aa, Enterococcus faecalis
NIFFCPKLPQVFSVNIREAIFRKIQTFSFGNIENFSAGNLVVRLTNDVTQIQNVIMIALQTLFRIPFLFIGSFILAMLTLPQLWWVIVALVIAVILISMLSFSQMGKHFMIIQNLIDKINGIAKENLLGIRVVKSFVQEKNQLSRFTKVSEELTTHNLIVGSLFAVMIPAFMLVANLAVVGSIFFVSNLVKDDPTLIGGVASFMNYLMQIMMAIIIGGMMMMMTSRAAVSIKRIKEVMETEPDVTYKKVPEQELIGSVEFDHVSFRYPGDEEDTLKDISFSIQPGEMIGIVGATGAGKSTLAQLIPRLFDPTEGKIEVGGVDLREVNEHSLRKTVSFVLQKAILFSGTIAQNLRHGKRDASEADMERASGIAQAKEFIEKLAEGYDAPVEERSNNFSGGQKQRLSITRGVIGEPKILILDDSTSALDARSERLVREALDKELKETTTIVIAQKISSVVHADRILVLDNGRLVGEGTHEELAATNPVYQEIYETQKGKEEA

SEQ ID NO: 4887 - protein, 126 aa, Enterococcus faecalis
KNGRIRPKPESITPQEKSEPEQPAPTPPEDQKTTVPSEEKKPSPKKKDKPVEKPAMSKEKKKQTKETTAHPLQVNKDFVFPNGLGAGGDEESESYLAAVGYFLSGNGLYGKKMDVREVYDIDDVFK

SEQ ID NO: 4888 - protein, 489 aa, Enterococcus faecalis
EKSMILMMFLNKVDKRKIALFQLLENAPMLTESKETVMQELELSEFIVNKTVAELNADFIEFGLSEDFQIVSDGIFLTLNESGTETSATLIDCYIKESLRFAMFQDFFFQRFDSVNEFALEHFVSHTLAYKEFKELKKMLENYQITINKEFHLVGNETNLREVTTLVFLQLYQRDFSLYGKKVLEQIRNFELFFSEKVHLNQRAGYAQAKCFHFLAVSLVRTQQQFYVEKKVDSQVLKQLAGDNQQNVFNWLESLQIPEPQRTNEGNYLLLFLIAEEWLQVASAALCQRFAEIQQLNRDLLSYLKIQFQLSEEVLQGFEQKVTIVHFKLFHFPIEANYSYLKMDITYFAETYTEYFSASRQFIQEQKTNPAVWDARRFLFYRYLLLMVDALPLKKVLAPITLCVDFSFGEAYNRMIQKNIEKITEWNIIFKAHVDESVQLILSDIHFVDWPEITQIIWLAPPRPVDWSHFIKTLSALRPHSGEEKKKSS

SEQ ID NO: 4889 - protein, 179 aa, Enterococcus faecalis
FVYISVQERRFQKSMVFDGWKRKKQIRALETLVDTKYEKMYRIAFNYTHSKEDALDVIQESFEKALKAIQKGPDIKDFDAWFFRILLSVATDYWRKKKREAVHIEKDEHVLALLNNPQRSFLEIEEIINQLDSPNREIILLKFFEGFTLKEIALILDINENTIKTKMYRSLNELRSLLN

SEQ ID NO: 4890 - protein, 296 aa, Enterococcus faecalis
KKGSEKIMEDFVKSVVKNFSKEYRQQPLPTDLQAEVKARFHKEKKRYTWLRFRNRSLQSSLVVACGFVLSVNLFPGFSEAARNIPVLDKIVQLVTIKTLTAKKQESEVNIDVPKIQTSQESSVADTLNKKYLKEAQTEFQQVKGQLFDGSRVSVTGDYEKVVDDRRFLVVKRTFTEIKGSSATTTKYDTIDKRANVVVSLPLIFKNDFYIDVISSEIKQQIADQMKNDSNKIYWSEKEDAPSDVQPFKKIKKDQPFYINEKHQLVIVFPQGEIAPYYMGTPEFVIPDQVIGGKKKK

SEQ ID NO: 4891 - protein, 258 aa, Enterococcus faecalis
NCRVFFADLTKSVAVLLREAYTRIKHNKKGRMAMEKSEKISILQDVVKIKSVNGNEEEVAIYLQNLLKKYEIPSELVSYAPNRSSLVAYLGENREKVLGFSGHMDVVSEGDESQWTFPPFAAHIEGNKLYGRGATDMKSGLVAMVLAMIELKEKKVPLNGAVKFLGTVGEEVGELGAGQLTEKGYADDLSALVIGEPTNYNLMYAHMGSINYSVVSHGKEAHSSMPEEGINAINNLNEFITEANQQMAEVTANLKILN

SEQ ID NO: 4892 - protein, 176 aa, Enterococcus faecalis
FERIYYRSKPTNGGSHSKFENPELGRTIHNVTVIKGGTQVNSIPGQAALQGNIRSIPEFSNDQVIALLQKIVDELNKKEKHQLELTIDYNKIPVKAEKDSALIQAIQAQFDQPLPLVTSAGTTDLAEFTKSDNTFDCVVFGPGVTTTAHQVDEYVEIDNYLDMIDKYQAIAKSYLN

SEQ ID NO: 4893 - protein, 254 aa, Enterococcus faecalis
KKPRTFIDLADQAHLIIEQTTKLPKKEAAILFLLIDNQLVALGLAEEKATYKEVSFDHSILLKPTWDTELAYLAQAFLDDAKESGLTLEATPTTVKIPKSAVATVTNYKETVTFILERFGYSLFKKPAPKKARPAKARHKWTKEVSQIPFYIDTRQSKATVFWQKRNEMLIKAGATMMPEAPLNKDGSVGFSARFGEKLRDERKGQFKDFVTTEDIVLKSVNEVGLFLYFAGTNSWLELVDENGKTLNEWTVVE

SEQ ID NO: 4894 - protein, 205 aa, Enterococcus faecalis
RRSVYDKLIINRAILSSKSQKPDEGITVDLDTLAFELLEKRYEFSGEKIWYFSEKVIETQAAPSMEENIKEIKKAVKRIGKKFNEDEFELMASVKEAVYDSIEETGTIDNEQIAEQVFKENVSAKLAYQEEVNESKFVDKTPPVRESREISEKKFGKQKLKMDNGIELIVPLDVYRNGDLIEFVNNPDGTVSIMLKNIEKISNQL

SEQ ID NO: 4895 - protein, 102 aa, Enterococcus faecalis
KKGILFLEVRKMKTLLKILIPIVILAGGSWGVYNYYYGGEAYYTQITTSGEKKDEKTNSGEAMTIYYYQQPAFNKNGEEKTVELNESRDQPLRMKAYLKLKS

SEQ ID NO: 4896 - protein, 236 aa, Enterococcus faecalis
RTMMPFYFGIDPTYILVIIGIAISGAASAYVNSTFRKYDQVRSSKHVTGTQAAQYILQKEQINDVGVQQIAGDLTDNYNSGNKMLSLSEATAQSTSVAAIGVAAHECGHAVQDHTNYVPLRLRAAIVPVANIGSTISFPLILLGVLFSWNQTLINIGILAFSLPLIFQLVTLPVEFNASRRALSILSEGGLLTEEEVPMARKVLFAAALTYVAAALSTFLQLLRLVILFGGNNRRD

SEQ ID NO: 4897 - protein, 72 aa, Enterococcus faecalis
DTFLIIFSEAMTATETLATAAMLKPIPIFVDAFISFSSSVIFYFNHNILLLLCVIERPLLALSLVGYCHQIK

SEQ ID NO: 4898 - protein, 120 aa, Enterococcus faecalis
KITEELKEMKASTKIGIGLSIAAVASVSVAVIASEKIIKKVSHVSNRYKVKKFVDDKFDGNQKLLSIVDDLSDDELDSVLNVVDRVKDGGSKLAEYGEKVKDNTDSLKERFFTFIEDAMK

SEQ ID NO: 4899 - protein, 286 aa, Enterococcus faecalis
KVGVPMKITAYVASAFSKNHEGGNKAGVVFMTQPLTRTQKMAIAKELGFAETAFISDSKIADFRLEYFTPKEEVDLCGHATIGAFTIMKHLNKLLQTAYTIETNSGLLAITANGEQLFMEQTVPTFYDTLTLEELSGCFDLNAVATAFPIQIVSTGLKDILVPIKNAQLLQDLQPNFEKIKLLSQKYGVIGMHLFALSEENIICRNFAPLYDIDEEAATGTSNGALACYLHHHQILQKTNYTFAQGYTLNAPSEVLVRLNTTSQKTIDQVLVGGRGYYVETKELFL

SEQ ID NO: 4900 - protein, 286 aa, Enterococcus faecalis
GVSMIIENLSQLYPKGYLSKTIGSEATYSIPVDDQFFIVNKAFLSIKEQHLLEALFPISENPTITGNHPWFSYLFQQAKLPAEGTFRMLQIQTNVTKELQAEWQFNLTKMFPDTVDCFSPSNNMYILVEEQSKNTFQQEEIQGIFLTLDTDFDCTSAVFVGNFYSSEDILRRCFHEEQRIFSEELNSSSRTTVFSLTDVALHYFTKEAMSQNVLVEYYRRLLNKDTDIQPIISALWKNQGNISSTAKDLFMHRNTLHYRLEKFFEQTGLSLKKMDDLIFCYLLLRK

SEQ ID NO: 4901 - protein, 173 aa, Enterococcus faecalis
LGKKETTLTQEEKEFFMREAIAEAKKAEGLAEVPIGAVIVRQGEIIGRGHNLREARQEATAHAEMYAIQEACRGIENWRLEETQLFVTLEPCPMCSGAMLLARIPEVYYGATDPKAGTAGTLMNLLEDERFNHVAYVEAGVLEEECRLLLVQFFKKLRAKKKEEKLLKNQKKD

SEQ ID NO: 4902 - protein, 131 aa, Enterococcus faecalis
NWRINMGLFDGLLGNATQNNNETAEKELRDVLIPNEKVDMAFTLVRDLIVFTDKRLILVDKQGITGKKVDYKSIPYKSISRFSVETSGHFDLDAELKIWISSTELPSVSLQFRKDKDIVAIQQALAAAVLS

SEQ ID NO: 4903 - protein, 345 aa, Enterococcus faecalis
NATRGDDCHHLGAAELIVQWSDETIQREFLAHAATDRIENVPQYKIDQTDDWIAKGASRISVVSSNPDALAGVDAQRVAAFQAANGKALVNLRKATQANKVSWTVVAAASEGWAAKVFPELATSEEQVDALWNEIFKTTRIYEENPVIAWDIHDKKLQEKAAELNEQQFTALHYTAPGTDLTIGLPKNHLWEGAGSYNARGEEFMANMPTEEVFTAPDSRRVDGYVSSTKPLSYAGTIISGMKFTFKDGKVVDFSAEQGEQALKNLLPIDERAKHLREVALVPDPSPISQSGLIFYNTLFDENASNHLAFGSAYAFNLQCGTEMSEEELPEAGLNRTPTHVDFMV

SEQ ID NO: 4904 - protein, 116 aa, Enterococcus faecalis
VGLPGVGTYGTLVNEMIETIGAKNVLANEKGWLPVTEEAAIAAKPEVILTNVNYMKDPAKEILARKNWESVPAVQNKEVFEIDNMSSSLPNNHITKALKQMAKAVYPEEYKDLKDE

SEQ ID NO: 4905 - protein, 176 aa, Enterococcus faecalis
  MISC_FEATURE (131)..(136): Amino acids 131 & 136 are Xaa wherein Xaa = any amino acid.
KMSKKTCLILMLLISMSMLFLGIKIGSVQISLTDLLQILVKKTVSEDGILEGIIWNVRLPRVVMAYLVGAGLAVSGTVMQSLLDNPLASSYTLGVSAGASLGAALIMVTGVTASILGAFLLPLTGFIFGLXTVFLXLLFTPTMDSQMSNQTVVLVGMIMTLSVRANLTWITALSPD

SEQ ID NO: 4906 - protein, 79 aa, Enterococcus faecalis
  MISC_FEATURE (10)..(15): Amino acids 10 & 15 are Xaa wherein Xaa = any amino acid.
LSIVGVNNKXKKTVXKPKIKPVKGNKNAPKIEAVTPVTMINAAPKDAPADTPKVYEEAKGLSKSDCITVPLTAKPAPTR

SEQ ID NO: 4907 - protein, 67 aa, Enterococcus faecalis
LRLKTTRPSAGGNASSTNSASGKRHTVKSGDSLWGLSMQYGISIQKIKQLNGLSGDTIYIGQTLKVG

SEQ ID NO: 4908 - protein, 824 aa, Enterococcus faecalis
QWLQVANFKNEKFYITRRNNMSYNHKEIEKKWQKYWAKNNCFNTLDDPNKEKFYALDMFPYPSGQGLHVGHPEGYTATDILSRMKRAQGYNVLHPMGWDAFGLPAEQYALDTGNDPAEFTKKNIETFRRQINSLGFSYDWNREINTTDPEYYKWTQWIFTKLYEKGLAYEAEVAVNWVPELGTVISNEEVIDGKSERGGYDVVRRPMRQWMLKITAYADRLLEDLELVDWPESIKDMQRNWIGRSEGANVTFKVAGTEESFTVFTTRPDTLFGATYTVLAPELELVKKITTPEQTAAVEAYIEETSKKSDLNRTDLAKEKTGVFTGAYAINPVNGQEIPIWIGDYVLASYGTGAIMAVPAHDERDYEFAKTFGIDILPVIAGGDITTEAYTGDGPHINSDFLNGLNKAKAIAKMNEWLEENHVGKKEVSYRLRDWLFSRQRYWGEPIPVIHWEDGTTTTVPESELPLRLPVTSDIRPSGTGESPLANIDEWVNVVDPETGMKGKRETNTMPQWAGSSWYYLRFIDPHNKNEIADFEKLKRWLPVDIYIGGAEHAVLHLLYARFWHKFLYDIGVVPTKEPFQKLYNQGMILGENNEKMSKSRGNVVNPDDVVAKYGADTLRLYEMFMGPLDASIAWNENGLEGSRKFLDRVWRLIVDEEGKMRDRITTINDGRLTKVYHQTVKKVTEDMANLHFNTAISQLMVFVNEANKVDALPYEYVEGFVQLLAPIAPHIGEELWQILGNEESLTYVPWPTYDETALVEDEVEVVFQVNGKLRGKQNVARGLSKEELEQIAMNHEAVKEFIEGKTVRKVIAVPDKLVNIVAN

SEQ ID NO: 4909 - protein, 97 aa, Enterococcus faecalis
QLPKKKLTFLIYLSDSSLKEELKLKKYRISLFLGLISLLLFMISILVGSTLSSDGLLKEPAFFCTPLGYFFLFIALLSVITITCKEHMNQKGKTKQP

SEQ ID NO: 4910 - protein, 151 aa, Enterococcus faecalis
KEKKMPTNKKEGMLFTTLMCFLMVFGMSTYNLLLHGEFSLYALSKGLLPGFIVAFILDVFIVGVLAKKIAFSLPFNKEKRLLLILTISSLMIISMVTCMSLFGLLMEGQTLSLSAYFQAWGLNFIVALPYQLLIVGPFSRMILTNYQQRQT

SEQ ID NO: 4911 - protein, 109 aa, Enterococcus faecalis
VLIPKTIRKHINVVKSIPSFLLVGIFFSFHLLRVMIVLGRKGQILSTFTSVAKIKVLHKLEFAKNLIQIKRCTKSAVHLFIRYLVYFCVICNVLSKPFLRNFTKGAIFS

SEQ ID NO: 4912 - protein, 193 aa, Enterococcus faecalis
LGLWKVNRITKSQPLDLIWERATLTTSERAEKVQFTQPYMTNDQVLVSLKEKNIATASDMQGKILGVQNGSSGYDGFESQPDVLKKFVKDQTPILYDGFNEAFLDLKSGRIDGLLIDRVYANYYLSHEDNLKNYTISHVGYDNEDFAVGVRKSDNQLVQKINTAFETLRKDGTLSKISQKWFGEDVTNNTKIN

SEQ ID NO: 4913 - protein, 72 aa, Enterococcus faecalis
  MISC_FEATURE (29)..(67): Amino acids 29, 45, 52, 56, 57, 62 & 67 are Xaa wherein Xaa = any amino acid. 1               5
FCLLSIDPIISVWKFNRKCHKRLKTRFGXKFEHQSPDNFVSDLWXQNPLGIXKRSXXPGKWXKDPGXWRVRG

SEQ ID NO: 4914 - protein, 356 aa, Enterococcus faecalis
FYVACPYSLLKHREGKKSLSALSGAACATFLPEAFLRYAVGGVFHLDYVSQIGETMGSLGGLAAGALVPLAFGISPVFSIILGLSLIKVSLLPAFITAYLLSFVVEQMQKRIPEGIDLLVVILVIPVAASLVAGFIQPVVLGVLEVIGGTILSAVDGNPYVMGAILGAIIPIVGMTPLSSMVLTALIGLTGVPMAVGALTCYGSSIVNAALFKKLKLGTASTPLAVAIEPLTQVDIISSNPIPIYATNLFSGMVSGIVVTFFGLKVPVTGMATPWAGLLVTLGNNAIQTTLLAVAIITVVSLMFGFLGALVFKRYRIEAVDNTPEFEGTTEVTSEKEKEAVKTKGGVTYEHSYGHQ

SEQ ID NO: 4915 - protein, 242 aa, Enterococcus faecalis
KPKEELRMNTAMAINKPKKVNKVMNYKSCFDIIGPIMIGPSSSHTAGALAIGLAARKLFGGTPEKIVIKYYESFADTHKGHGTDFAIIGGILGLAADDANVTQSIELAEEQGIEIQFLEMSEESPVKHANTACVTLSDATHEIHLTGISVGGGTIEVKYIELDGFNVQLHGPLPILLVINQEEQAMQAFKDTLQKNNIQVNAVSRYVEGNQILFIFDLDSAPISSVKEQLFSLDDTSKIILL

SEQ ID NO: 4916 - protein, 298 aa, Enterococcus faecalis
HMYLSIEEFIDKAEKTGKKISDLMIEQEMERSQKSYEEIWTQMGQNLDVMDAAVKRSQEGAGVFSPTGLTGGDAARLKKYRAAGKTLSGDLMMSAVQAALGTNEVNAAMGVVCATPTAGASGTLPGVLTAIKNTLNLTRDQQIRFLFTSSLFGMVTANNAMIAGAVGGCQAEVGSASAMAAAAAVEAAGGTPRQSSEAFAMALGNLLGLVCDPVAGLVEIPCVKRNTVGAGNALIAADMALAGIVNKIPADEVVEAMNKVGRQLPRELRETGLGGLAGTATGQRMKNEIFEKVKFTIV

SEQ ID NO: 4917 - protein, 440 aa, Enterococcus faecalis
KSKIHHCLKFNHEEGNKMLDMKKIRQNVEVVQKKLKTRGVDEEVLLRFLALDEGRRALLVKVEELKKHRNQVSGEIAQLKRAQKDASQQLLNMQEVSEQIKVLDQEVVHLQEQCTAIAERLPNLPHESVPVGADEAANVEVRRWSTPKTFSFEPKPHWEIGEALGILDFERGAKVSGSRFLYYKGLGARLERAVYNFMLDQHVNEHGYTEVIPPYLVNSKAMFGTGQFPKFKEDVFQVAESDLTLIPTAEVPLTNYYNNEILDAQELPIYFTALSPSFRSEAGSAGRDTRGLIRLHQFHKVEMVKFSDAEHSYEELEKMTNNAGDILEKLGLPYRVITLSTGDMGFSAAKTYDLEVWIPAQKTYREISSCSNCEDFQARRALIRYRDKTGHVQYAHTLNGSGLAVGRTVAAILENYQNEDGTVTIPEVLRPYMGGLTKID

SEQ ID NO: 4918 - protein, 325 aa, Enterococcus faecalis
VFLLNTVFFLYNNQKAKKGFLMTEQFILTSNDQQTQLNVRHWPCPSPKAVVQLIHGMAEHIQRYDEFARFLNQLGFTVIGHDHLGHGESVQPNAPIYGFFGEQGPENVVTDIHQVKQWAVNRYPQLPYFMMGHSMGSFALRNYLQDYPVTVQGVIFMGTGTSPLPLTAALPFIKKMAEKQPKKPAPFIDKLAFGSFSKKFPEASSFNWLSKNQANVADYENDPLMGFVFTNNGFATLFSLVKRANQRNWYQAIPKELPILIISGAEDPVGDFSKGPAKIQKQLKHAGFQHVTLRLFPTLRHEILLKTEKATVFQEIGHWLTDLTN

SEQ ID NO: 4919 - protein, 163 aa, Enterococcus faecalis
ELSWWTLAKCQTMIKRVVTENEIHTQSELLALLEKENIHTTQATISRDIRELNLNKVDNGQGEAYYRILNNSALRPKYKTDEERLVDIIIETGVSLTQIEFTNLLTVLPGNGQAIGVLIDRIRIHNPHILGCIAGDDTILILSKNKEDALEVNNYFQQYLYHP

SEQ ID NO: 4920 - protein, 235 aa, Enterococcus faecalis
RPQGNTLRAAHEINKWFPEYKKFNFVNKLDLGISSFGKPFFLDTNILFLLLFFILFFLSYKKCQNYYIRILTALPLFLNLITFFGNTMGQSFTYVNGNKRSMIWNSNNLGNIFTRFGTKLSIYHPGTWVATFIVLGLLLCLIIGIYISFDDKKSAVFLVVLMMMGFCSRLIMGFSPTVWASGMRTYYILFIVVAIIVLKGINEMKKNMSLQKKELLSFSLTLLGICTLVLTVLNR

SEQ ID NO: 4921 - protein, 78 aa, Enterococcus faecalis
RKRSASISKNCDVLNKLDASLEELSSLDEDTKKHSMKKWIVEKKAIHEIKKIAHEAGKYDKYDEKELEKEMDLLEKFM

SEQ ID NO: 4922 - protein, 354 aa, Enterococcus faecalis
VTFYQLLQLDPFILKQKIHQADTKKQRRYFWRALLIRDILLVSFAILWVSTITFFFGKAVAPFSIVLFCLLLSIRFVSYGYREKQALLSLGIVLTILGVSPLISLISVSFLQWGLHFICLLALFFLTGKNPKMGNPGLYTFSYLYLVGTVHYQSFQQLEQTFFVLVFAYLLLAFVYHVKHKKLDQEITFIQMVTENGFFNQRNIWFGYYALGISLLLFIGTHLQIDRFMWATFASSSLFSGYETFKLSERAKERIIGVVIGSLVSAILLFYIPTNLLGILGGLCLGLCTSYKSKTIFNCVGAIMAASMIFGLETSLYLRILLNMLGLAYGLLYHFVFVKTMSYCNRKEWLKLSE

SEQ ID NO: 4923 - protein, 398 aa, Enterococcus faecalis
RRPLSLSNPVYAVLVLVISEWLAGIERDSKIQKNSKIEKRIELKMKKSLLGLIVFLSLLTLTSCRNKVTTKELMANEWAVNSNVDEVVMIVSFSEDTATFKINTDEHTSTAKNELEKAGEELGKQIANKIEYKVKYHLKNNQIRWENEGKEVAYKIKKEKQDLLFTPTKTNNSDNQTKLVLKPYTKKSIDSSTQKDKTEETSSNYQNVSSETNQSTSSSTTKEPLPQVSLADFIGGWGIPQSDNLFFINADGTLTSITQSNVPLQNVSFSVDENGNQIMTFLLNNTPRTVTKNNDGTLTVNGQIYTYLGNITLEQLIERNNQTQQVFEQSEQQPPQNSDSREQIQNSKSDQPIYDTVRSGEGGRQLAERNGLTLEELLALNPGIETSVFYPGQSLRIK

SEQ ID NO: 4924 - protein, 534 aa, Enterococcus faecalis
NLYDKIRTSLAKKMEGENMATFKRILNLENYIFTFFILFVFYGAINSPYSLVKILWEKPKHLLVLLPLLIILLLIIYKNKKFLYTKIQALWHLIKTHDRVVIIGSLISLFLLQLLLLTQITVPIGWDVFDNFHSITTENKDYSKIVLSLNPNNEFFFFMMYYLNKFLRFIDVTGSWSNTWFSWQVVNCLFINSSLFLFYHASKRVFNPLTAFVAYSLFFLSFGLSPWLLTPYTDTAVLLFINLVFFAYSLFDQVSPPFVKYCLLLFIGIGLAWCFLMKPSSIIFFIAFSCIKVLQLLLVNRNKQSIVKLTVVALFLLTGFASAYYSFQFFVEKQTITEIDKEQAKPWTLFVMMGLTGTGGYNDADTQAVNQLPTQEAKKAYTIKMIQDRLKNKGFFGYLRFLAQKNRHNTANGDFDWGWDGGDLIPETPSKNRWQEHLRSLYYPQNQKSNYLRIYMHFFYLLTLLGLLFSIPLKDSKNNYAILKLAFIGAILYLLLFEGGRSRYLIQFMPFWYLLSASGWLGLREIRRYKKIVK

SEQ ID NO: 4925 - protein, 197 aa, Enterococcus faecalis
IQRGVFMVKIEEKGKVTFGQAFKDYFRGYVDFKGRTTRAGYWWMTLVLSILALIFYIAIVGKAVSAILAAEYFETYDFGNLLPLMLFALVLWLALLLPTWAMCVRRYRDAGMTGWGVLVLYLLSIACSYTQVFSVMSTLKYDVQTDTVITGGSPVFLFFTLVISLFFFLLTVLPTDKLTTTSQNSVLRFFFRYKEVK

SEQ ID NO: 4926 - protein, 206 aa, Enterococcus faecalis
MKISIRHRYIAKIPALEVTTEEQKNEALPLIVYYHGWQSAKELSLTQARKLAHEGFRVILPDAMNHGERKTGPISTIPSITFWSSIQYNLIEFPVIIHHFHKLGLIKENWIGVGGVSMGGITTSALMTQHPEIQAAACLMGTPYPARYIQRVIQRAKEFAIFVPKDLPLLLSWVHQYDLSQTPERLQERPMLFWHGTEDSSLRDCD

SEQ ID NO: 4927 - protein, 182 aa, Enterococcus faecalis
SILNIYKINKVVYGITVGLLREIMDYAEALWARGNCWITIAIPEIIEILELPKGDSLREFLLSTLNAQVAALAKYQDESGLWHTLINDSNSYLESSATAGFAYGILKAVHKKYISSEYEEVANKAIAGLLNEIDETGEVQHVSVGTGMGDNLDFYRTIGMTAMPYGQSLTILCLTELLVSYC

SEQ ID NO: 4928 - protein, 234 aa, Enterococcus faecalis
LPMIIKQEQFIPKDTVETTIDLLIRNLTTIKDNTGEFLLDFDGLKVDDKSWTIWNWPQGVGLYGIYKNYRNTKSEKALQVVNDWFEGRMQEGAPPKNVNTMVPLLTMAYLYEDTKDSKYIPYLEQWAEWVMEEMPRTNEGGLQHATYGPENKNQLWDDTLMMTVLPLAKIGKLLNRLDYLEEAKHQFLIHIKYLQDKQSGLWYHGWTFEGNHGLCGSTVGKRKLLDYDCYSRNY

SEQ ID NO: 4929 - protein, 269 aa, Enterococcus faecalis
TKERGENMEFKMNDFQLDGKVALITGAVYGIGFEIAKSLAEAGATIVFNNLSPESVEQGLENYRAAGIEARGYVCDVTDEEQVQAMVAQIKEEVGSIDILVNNAGIIKRIPMVDMSAEEFRQVIDVDLNAPFIMAKAVIPDMIEKGHGKIINICSMMSELGRETVSAYAAAKGGLKMLTKNIASEYGQYNIQCNGIGPGYIETPQTAPLREPGHPFNEFILGRTPANRWGTPADLAGPAVFLASNASDFVNGHILYVDGGILAYIGKQP

SEQ ID NO: 4930 - protein, 283 aa, Enterococcus faecalis
EILVMQNMETRYTHSPADIRHYSTEQLRDEFLVEKVFIPGAISLTYTHNDRMIFGGVTPTTEELEIILDKELGVDYFLERRELGVINIGGPGFIEIDGAKETMKKQDGYYIGKETKHVRFSSENPDNPAKFYISCVPAHHKYPNVKISIDEITPMETGDPLTLNQRKIYQYIHPNVCESCQLQMGYTILEPGSAWNTMPCHTHERRMEAYVYFDMEEDTRIFHMMGKPDETKHLVMSNEQAAISPSWSIHSGVGTSNYSFIWAMCGENITYTDMDMVAMDQLK

SEQ ID NO: 4931 - protein, 365 aa, Enterococcus faecalis
RQQQLGILKKFVRLPKPIWKNSKQSKGCRHMGKVVTLGEIMLRLSTPVGIRVAQTENFAVHYGGGEANVAISLANYGHQVTFASKVPDNSLGEAAKKHLSRYGVSTEFVRTGGTRLGTYYLETGTGERAASVVYDRAYSSFAQIEEMEWDLHELFSGVEIFHISGITAALSKNWQSMTVALVKAAKQAGCQVSFDINYRGKLWSQKEASVALKAILPFVDICSAGVLDARYLLEIPEPEEELEDALTWYYRKMQERYPNIQVFYSTKRQVHSATDNELIGTLWYKGAYYTSKCHRLQPIVDRVGAGDAFAGGVLHGILAAYDPQTCIDFATAASALKHTVHGDCNQFSQKEVLAFLATGSGKINR

SEQ ID NO: 4932 - protein, 218 aa, Enterococcus faecalis
GSLLKRVSILQKLENAGVIAVVRGKTKEEALKASQAIVAGGMRGIELTFTVPQATEVIQELVALYQENPDVVIGAGTVLDATTARLAIVAGAEYIVSPSFDEETAKICNLYQVPYLPGCMTITEMKEALKSGADIIKLFPGSVYGPSVISAFKAPLPQLNIMPTGGVSLENMAEWFAAGVTAVGVGGNLLAPAATGDFEKVREVAQAYMEKFQAIKGV

SEQ ID NO: 4933 - protein, 97 aa, Enterococcus faecalis
LLALPLLSFREPQQSRQHFLIFVKLILASTDSLISYLEIYIYYREIHNFIIQIKKENANVFTKIKKERQTKIPIDFCLSFYFYYNFASIAAFVAKRA

SEQ ID NO: 4934 - protein, 259 aa, Enterococcus faecalis
FLIWKRRVSMKETKPYGTVLLKAAKIMDCLSLQPDQTLQEIAKNTEMTASTAIKILETLTLIGYVQKDTNKTYRLGTKLIRYANQSVEQIDLAEIAVPYLENLQNTVDETIHLGILNNNEILYINKLEPKNQTIRMSSKVGITRPLYNSAMGKAVLAEFSEEQVQQYLDTQTLIPYTENTITNPLRLKKELKQVQQTGVAYDDEEIEQDIFCSGVSLMKDGEIAGAFSVSMPKYRLTEENKTTINQALLATKAAIEAKL

SEQ ID NO: 4935 - protein, 65 aa, Enterococcus faecalis
ADDEQIFSQMFHGISEVCPNYVAIDLGDFDEEQKLYVVFNETTEVSEYLLIPKDADVSDELKKRK

SEQ ID NO: 4936 - protein, 181 aa, Enterococcus faecalis
LMEMIKTLYVTGYRSFELGIFQGKDPKITVIKNVLKKELASYIETGVEWILISGNLGVELWTAEVVGELKTEYPEVQLGLLYPFKDFGNNWNEQNRELLTKAESLADYINSVSHQPYQSPAQLKMHTKFLLEHSGGSLLIYDKEYPGKTEYFLKDAQHFSEREPYDIRLITMDDLQNSVID

SEQ ID NO: 4937 - protein, 165 aa, Enterococcus faecalis
AINQSNQYYLLNKQAVVHKKPTPVQIVKVDYPKRSAAVIKEAYFRQASTTDYNGVYQGRYIDFEAKETKNTTSFPFKNFHQHQIDHMEQCIAQQGICFVLLWFSSLKRCFFFSGENLITHWKNQAVTGKKSMPLALIEKEGIELSFGIAPRIPYLDAVEQYIQTH

SEQ ID NO: 4938 - protein, 65 aa, Enterococcus faecalis
LDFDEVLDACLAAREPEFAVGINSNSFVILSKLYESSVSEYIVPLRRDKGFAVRFQKIIQFLLSR

SEQ ID NO: 4939 - protein, 789 aa, Enterococcus faecalis
SFESITKELLFMPTANSGSRAARHASNTSSKSSYKKKTQPPKKKKRLVLKIFLGLLIAGMVAFLAGVGLFWFYARQAPKLEDDKLNATVSSKLYDINNEIFEDLGAEKRELIQPNDVPQLLKDAIVSVEDRRFYKHIGVDPIRIIGSALSNVKNGGLQGGSTLTQQLIKLSYFSTKESDQTLKRKAQEAWMAVRLEREKSKEEILTYYINKVYMANGFYGMETAAENYYGKHLSELDLPQTALLAGMPQAPNSYDPYTKPDTAKERRDVVLYTMYDNKKISKAEYEKAKATPIDEGLVPLKASDDNRKVVDNYVKEVINEVKAKTGKNVYTDGLDIYTNLDMNAQKQLYDIVNSDQYVAFPDDKMQVASTVIDVASGQVRAQIGGRHIPDDVQLGNNLAVNTQRDVGSTVKPIMDYGPAIENLNYSTGRLMVDKPTKYPGTDIDVFNSDLTYQGVITMRRAIMGSRNTTAVQTFDEVGKENIMPFIKGLGIDYKNLEASNAISSNTSDVDGDKYGISSLKLAAAYAAFANNGIYNKPYYVNKVVFNDGTSVDYQPDGKRAMKDSTAYMMTDMLKDVLNGGTGFNGAIPGLIQAAKTGTSNYTDEDLARMGTTEKGIAPDSTFVGYTTHYAVSVWTGYNDRNTPIYQEYYGIASDVYREIMSYLSQNVSNDDWVQPDSVVRVGNELYVKDAYEVPNVQVLPSTTSSAPQPESSSTVESSSTKEAESSSSSSSESAPSSSEAPPSTEQPASSSSAEQPATSEQPPEPSSSSSQEPPQPPESSSKPDENKAA

SEQ ID NO: 4940 - protein, 127 aa, Enterococcus faecalis
AKMDEVIQFTSSIFNLKKYGAHHEPRTFYAALFSSGLELLSGGCGGSCELELEGSGGCSDVAGCSAEEELAGCSVDGGASEEEGALSELELDELSASFVEEDSTVLLDSGCGAEEVVLGKTCTFGTS

SEQ ID NO: 4941 - protein, 557 aa, Enterococcus faecalis
ESQSCFTSLYKILSKKGFLTIMTKYIFVTGGVVSSIGKGIVAASLGRLLKNRGLKVTIQKFDPYINVDPGTMSPYQHGEVFVTDDGAETDLDLGHYERFIDINLNKYSNVTTGKIYSEVLRKERKGEYLGATVQVIPHITNEIKEKIMRAAKMTDADVIITEVGGTVGDIESLPFLEALRQMKADMGSDNVMYIHTTLIPYLKAAGEMKTKPTQHSVKELRSLGIQPNILVVRTELPVSQNTKNKLAQFCDVNPEAVIESRDVETLYSIPLALQAQNMDQIVCDHLKLDAPAADMTEWRALEEKVLNLKKKTKIALVGKYVELPDAYISVVEALKHAGFDFDSDIEIDWVDSQELTAENVAERIGSADGILVPGGFGDRGIEGKIEAIRFARENDVPFLGICLGMQMACVEFGRNVVGLEDAGSAETNPDVTNNIIDLMADQENIENLGGTLRLGLYPCKLKKGTKTAAAYGNEDVVQERHRHRYEFNNKYRQLFEENGLVFSGVSPDNRLVEIVEIPEKQFFVACQFHPELISRPNRPQRLIKGFVGAALANKESK

SEQ ID NO: 4942 - protein, 210 aa, Enterococcus faecalis
KDVYLLEINVFEGLNKKELSMIEVAHAILEQHADVMDFSDLVNQIQNYLGKSDSEIRDQLAQFYTDLNIDGSFISLGDNRWGLRSWYPIDSIDEEVTHGLEEDEEDAPRRRKRKKVNAFITNPNDEDVIDYNDDDPEDAELTNDDEEDILYDDEEDEDEEIKAYNSDLQEIGADSDDDEEDIPQIEEDLTIIDDDDVEDEDDFDDEYSEE

SEQ ID NO: 4943 - protein, 199 aa, Enterococcus faecalis
EENDMSTKDVKELAIEQAKKFGGKLEVCPKVPIETKADLGIAYTPGVAAVSSAIHEKKERAYELTTKKNTVAVISDGSAVLGLGNIGPEAAMPVMEGKAALFKRFAGVDSIPLVLDTQDTEEIIQTVKFLAPTFGGINLEDISAPRCFEIEQRLIDELDIPVFHDDQHGTAIVVPSGFVQQLKINQQENRGHSCGNQRR

SEQ ID NO: 4944 - protein, 449 aa, Enterococcus faecalis
IKVIGGNSMEKKLPATAANETDWRNKLTKTRIGSVTLPVYLVTASIILVTALLEQLPVNMLGGFAVILTMGWLLGTIGGNIPILKHFGGPAILSLLVPSIMVFFNLLNQNVLDSTDILMKQANFLYFYIACLVCGSILGMNRKILVQGLMRMIVPMALGMILAMGVGTLVGTLLGLGWKHSLFYIVTPVLAGGIGEGILPLSLGYSAITGLPSEQLVGQLIPATIIGNFFAIMCSGLLSRLGEKRPELSGQGQLIKITNSDDLSDALEEDKAPIDVKLMGAGVLIACTLFITGGLLQHLTGFPGPVLMIVVAAFLKYLNVVPKETQRGSKQLYKFISGNFTFPLMVGLGMLYIPLKDVVGMLSWQYFVVVISVVFTVIATGFFVSRFMNMNPVEAAIVSACQSGMGGTGDVAILSTANRMNLMPFAQVATRLGGAITVITMTAIFRMLF

SEQ ID NO: 4945 - protein, 80 aa, Enterococcus faecalis
TGNVTEPILVLVNLLRQSVSLAAVAGNFFSMLFPPITLIYIHHNVNVFCRVDYLINLTKEKFFNQIFLCYTLFEEKRGME

SEQ ID NO: 4946 - protein, 522 aa, Enterococcus faecalis
REKRDGMKRGGKLWCFLSVIFIATLIIMITFFYGVTTVQTIKEVRKNQEQALLAVGEQLAIEPNVIEALKNDHYSDELEAYTVRLGEIHQLDFIVIMNMQGIRLTHPDRQKIGKHFEGGDEVRALKGEEHLSVSQGSLGESLRGFVPVYDQGKQIGVVAMGIKMTSLSQLIERTKNDYTVSVLLSVGFGFILAIVVSYYLKKQLHDLEPREIARLLEERNAMLEETKDAILVIDTDQNILLANIEATKMYHNITNSEENLLGKKLSALVLSPEKLVVHSKTEQFYRQNGQDYFVSIAPINVRKKTIGHVIFLKNATETFIVAEQLVSTTTYASALQSQSHEFMNKMHVIYGLVDLEDYEALKHYLADLLKPEKEFAQRLAILVRNPILAGFLSGERIKFAEIKTQLAIEIYPEIPPNKRDEDTQNLIAIYRYIHRFLMEQTLPEEIIETIDYQPGSLTTTYSFAYPKEQLERFEQEFFTSYLARLLENAEATLTWENQQNNWLVLRINVHYEGAEENEPIDY

SEQ ID NO: 4947 - protein, 239 aa, Enterococcus faecalis
MFITKEQRKMNLLIIEDDPMVAYIHQKYLEKLIHQPTIFTVATIAEGLLLTKEKQPALVLLDVHLKDGNGLTYLATIRDEKIDTEVILITAANELENVKRSLHLGVLDYLVKPFSFERFQQSIENYQKKTAQFTLETKELSQTKVDQLFHYSQTNARKNEQALQNMSLEKGLTQATLQLLLKKIDEFTDYFTIQELAEASQLSHVSVRKYVLFLEKNNLLESKNSYLKVGRPYQSYRRI

SEQ ID NO: 4948 - protein, 502 aa, Enterococcus faecalis
IKKVIEKWRNTEDTPFYSHLKHLIENGKEDIICYFLRIYDILYYVRNNIIWEERAMKVIVLGSSHGGYEAVEELLNLHPDAEIQWYEKGDFISFLSCGMQLYLEGKVKDVNSVRYMTGEKMESRGVNVFSNTEITAIQPKEHQVTVKDLVSGEERVENYDKLIISPGAVPFELDIPGKDLDNIYLMRGRQWAIKLKQKTVDPEVNNVVVIGSGYIGIEAAEAFAKAGKKVTVIDILDRPLGVYLDKEFTDVLTEEMEANNITIATGETVERYEGDGRVQKIVTDKNAYDADLVVVAVGVRPNTAWLKGTLELHPNGLIKTDEYMRTSEPDVFAVGDATLIKYNPADTEVNIALATNARKQGRFAVKNLEEPVKPFPGVQGSSGLAVFDYKFASTGINEVMAQKLGKETKAVTVVEDYLMDFNPDKQKAWFKLVYDPETTQILGAQLMSKADLTANINAISLAIQAKMTIEDLAYADFFFQPAFDKPWNIINTAALEAVKQER

SEQ ID NO: 4949 - protein, 127 aa, Enterococcus faecalis
  MISC_FEATURE (24)..(24): Amino acid 24 is Xaa wherein Xaa = any amino acid.
RRRGRDEEEREQGVWYSRMRYEDXNGDYGRQERQRKVIEGIVQKVLILNSVSNYQEILTAVSDNMKTDLSFDDMKKIALDYRSAFGKVKQDQLQGTGFMQDGVSYQRVDEQELTRVQQELKNQLNTK

SEQ ID NO: 4950 - protein, 320 aa, Enterococcus faecalis
TTTNSEGGAKKMAEKIQLTKKDRLAVAWRSTFIQGSWNYERMQNGGWAFSMIPAIKKLYKTKEERSAALKRHLEFFNTHPYIASPILGVTLALEEERANGAPVDDVAIQGVKVGMMGPLAGVGDPVFWFTVRPMLGALGASLAMGGNILGPILFFVAWNLIRWSFMWYTQEFGYKAGSKITDDLSGGLLQDITKGASILGMFVLAALVQRWVSIKFLPIVSQVKLDKGAYIEWDKLPAGGEGMHKAFEQVNQGLALSPTKVTTLQDNLDQLIPGLAPLLLTFLCMWLLKKKVSPIVIILGLVVVGVVVHIMPVFTTSSPP

SEQ ID NO: 4951 - protein, 282 aa, Enterococcus faecalis
QTRNSSNTNQNRRLIMSVISIILVLLVTFLAGMEGILDEFQFHQPLVACTLIGLVTGNLEAGIVLGGTLQMIALGWANIGAAVAPDAALASVASAIILVLGGQGVKGVPSAIAIAVPLAVAGLFLTMIVRTVAVPIVHMMDAAAEKGNIKQVEMLHIFAVCLQGIRIAIPAGALLFIPADTVRNFLESMPAWLTDGMAIGGGMVVAVGYALVINMMATKEVWPFFIIGFVVAAISQLTLIALGALGVALALIYLNLSKMGGSSNSNGGGNSGDPLGDILNDY

SEQ ID NO: 4952 - protein, 385 aa, Enterococcus faecalis
TVLIKASADVEKNQELLKFFHLFLSESDLSDFFQKVKAFSSTTMKKNINYTGGIKMVGIILASHGEFAEGILQSGAMIFGEQENVKAVTLMPSEGPDDVKAKMQEAIASFDNQDEVLFLVDLWGGTPFNQANSLLEDHKDKWAIVAGMNLPMVIEAYASRFSMESAQEIATHILETAKDGVKVKPEELQPAEAPKAAATEDAQPKGSLPPGTVVGDGKIKFVLARIDSRLLHGQVATAWTKATQPNRIIVVSDAVAKDDLRKKLIEQAAPPGVKANVIPISKMIEVAKDPRFGNTKALLLFENPEDVLKVVEGGVEIPEVNVGSMAHSVGKVVVSKVLSMGQEDVDTFDELKAKGIKFDVRKVPNDSKANMDEILKKAKNELANA

SEQ ID NO: 4953 - protein, 197 aa, Enterococcus faecalis
GVPFYLKFLSKKTKVLTFKNEFKGAFPMVMDIRLARIDDRLIHGQVATVWAKLTNINRILVVSDSVAHDNLRKALLVQAAPPGVEVNVITVQKMIDVYPDPRFDSFRAMLLFTNPLDVKRVVEGGVQLTSVNIGGMSFSTGKRMITNAVAVDANDLKAFLFLNEQGIELEIRKVAADSQVNLMDLLKKERSKENNAS

SEQ ID NO: 4954 - protein, 584 aa, Enterococcus faecalis
AEIVVGMSFPVNREVLAELSKYLEPQLVVSPNESLVAIQSDAYELPYNLYEIIGDKAALLKADGLDQELINNFITTDINVHLKSFYKDYGFTFDTENKLAEIVDQRIIDVTKKIYNFAAKRLSYSFQPNFIYAMSLHISSFLKRIQLGKDPKHPLNESIRNMVLDYPTEFETAKEIKNIIESSYQMEIPESESYYLAVLLISLRENPEAGRIGIVVAAHGNSTASSMVQVVSQLLNVDNLKAVDMPLDMPPKEALRKIVEAVGEVNEENGVLLLVDMGSLSTFSEEIVRQTGIDVRTVDMVTTPIVLEAARKTALIDTQLETLHESLKNFHGYADIRQSETKQIIENWKTRAIIAICASGEGTARRMKELIEEAVLPQIDWHLEVIPLSIVNMKEVLPKIQEDYEIIATTGITNPKIGVPYISMENFFSGEAEKIIQQLLAERKEEVMNKPLDEAAAKEICLKYMEQSFTFINGKKIIDLLWSFAKNIQTQLAMPEEYTFYINLIMHTSGMLERILRNDTLTVSEKELGRLVQEPIYPVIVSSIETMEEALNMDVPAEEVYFIAQLVKNAQCIEDKITEIDTLD

SEQ ID NO: 4955 - protein, 74 aa, Enterococcus faecalis
IQSPWPGQLIKALKGYVKSRDITQIFLEVRESNILAQKLYEKTGFRKVAVRKNYYKEPQENAFVMCAKLRKEAQ

SEQ ID NO: 4956 - protein, 366 aa, Enterococcus faecalis
RTARKCLCNVCEIKEGSPMTIFTKERKLLLAVESSCDETSVAVIEDGDKILSNIVASQIKSHQRFGGVVPEVASRHHVEQVTICIEEALTEAKVTPEELSGVAVTYGPGLVGALLIGLSAAKAFAWAHQLPLIPVNHMAGHIYAARFVAPLEFPLMALLVSGGHTELVYMKEDGSFEIVGETRDDAAGEAYDKVGRVLGLPYPSGKEIDALAHEGTDTYQFPRAMLKEDNYDFSFSGLKSAFINTVHNAEQRGEALSTKDLAASFQASVVEVLVTKTIRACQEYPVKQLLIAGGVAANQGLREAMRHAISEQLPAVTLLIPPLKLCGDNAAMIGAAAFIEAEKNHFASYNLNAEPGVSFMTISEEG

SEQ ID NO: 4957 - protein, 598 aa, Enterococcus faecalis
SGTAGKFSSLTKQIILFCQRRFCFFNTYKLIRRVLMNNKEIVAKALHDVLNEELTMDQIEQLLENPKSVDHGDVAFPAFSLAKIYRKAPQQIAAELAEKIDGTNFEKIEVVGPYLNFFMNKEAVSQAVIGEVVKEKNNYGNSTFGNNGNVPIDMSSPNIAKPISMGHLRSTVIGNSIAFILEKIGYQPIRINHLGDWGTQFGKLIVAYKKWGSEEAVRQQPINELLRLYVQFHEEAEEKPELEDEARAWFKKLEEGDQEANELWKWFRSESLKEFDKIYSMLEVEFDSYNGEAFYNDKMDEIVTLLEEKHLLTENQGAEIVDLTEYNLNPALIRKSDGATLYITRDLAAALYRKRTYDFAKSLYVVGNEQSNHFKQLKAVLKELGFDWSDDMEHIPFGLITQGGKKLSTRKGKIVLLEEVLNEAVTLAGNQINEKNPDLANREEVAKQVGVGAVIFHDLKNDRLNNFDFVLDEVVRFEGETGPYVQYTHARAMSILRKANFTPDATQRYALNDKDSWEVVKLLQKFPETVMQAAEKYEPSVIAKHSIHLAQAFNKYYAHVRILDEDAQKEARLALVYAVATVLKEDLRLLGLHAPEEM

SEQ ID NO: 4958 - protein, 187 aa, Enterococcus faecalis
IAGVLYSSQVIKGLEKVAPNYMTEKWREDEEYLSYVEDLLATEEVQKLAEYTQHMHSTRLEHSISVSYHSYKLAKRWNGNARATARAGLLHDLFYYDWRTTKFDEGSHAYVHPRIAAKNAEKITELSDLERDIIIKHMWGATIAPPKYKESYIVTFVDKYCAVKEAALPMTTAMKTKWRQYFGQQSI

SEQ ID NO: 4959 - protein, 115 aa, Enterococcus faecalis
NVFTEVVFLKENFLKQKRMEKNLTLEQVGNFVGVGKSTVRKWETGMIENMGRDKIVALSKILDVSPLEILGIPETEETPFVVPTNIMNIYKQLTTENQEAVFRYAQKKLTEQNYF

SEQ ID NO: 4960 - protein, 123 aa, Enterococcus faecalis
KNQHFLMILTFFSQNDIILSVLLDTEKGESKMESNLIHSKLKMKGKNVEWLANEMTAYGQPISASTIYKKLKGEVVFKASDIKLISQLLDFNNEEIMTIFFSELVSKKTHITVERIVMNEKKY

SEQ ID NO: 4961 - protein, 507 aa, Enterococcus faecalis
  MISC_FEATURE (505)..(505): Amino acid 505 is Xaa wherein Xaa = any amino acid.
MKKSINKLFSICLIIFTIIGSNTSIISYAMDNESGTQIRSIAVEYPGEKTEIVATKDWATVSLSLGISELASGETMTLRMASEKYSYSMTPFEIGDALQVIPNDDGTWTIKALQTLTDYSADLQLKLRYNQNLSEDFEDQVVFTFGDSQKIVKINIGQYVEKVPPTELVRKVPLGFTSEGRIAWVIYFNYNQAGLSGSEKTTFKFLDNVGPNQTLAIDSIAAYLTKQPILETNGEMIRNLEHDEYSYDASQFFQKNASESGFNYEAEKFEGIPTATGSYLSNKNAYYIYLETIPNENIPSDAVLSNYTYMRISSEGFDAWEDDDIAYITADESSDGTGRGGVVLEKIDAVTAKVLEGAVFKVVNTKTQQVVQETLTTNQAGQIRLAGLEAGQYAFIETKAPTGYKLDATPVPFEIKLEQTQTIRLKKENTRLENQLKVEKVDENNEVKRLAGAEFSLYDQKNNLIEKGVTNENGELLFSNLSPDGEYYLVETKGANGYELNETKXPV

SEQ ID NO: 4962 - protein, 87 aa, Enterococcus faecalis
TVQNDRRAGCIICTNHYDWREATEQMMSAITRRRMAFVSDEQYKVTEGQVVSFARKCSYDSRHSQILLSTTTDAKRESSYYLRLLDA

SEQ ID NO: 4963 - protein, 357 aa, Enterococcus faecalis
RMIELKNISVTFQQKKQEIQAVQDVSLTIDKGDIYGIVGYSGAGKSTLVRVINLLQRPTAGTVIINKENILTFSKKELRQQRKKIGMIFQHFNLMKERTIFSNIDFSLKYSGLSKSERRQKISHLLELVGLSEKRDAYPSQLSGGQKQRVAIARALANDPEILLCDEATSALDPKTTGQILALLKKLNQELNLTIVLITHEMQVVKEICNKVAVMENGCVVESNDIVSIFSQPQQPLTKDFIRTATHIDQALTTILEHPKLADLDKNQELIEFSYVGDQTNEPLIAQLYSQYQVYTNILYGNVEIVQNVPIGHLIVVLSGDEAQRQQALTYLAKQGVRTNVLKTYQQTKQKQNLQVI

SEQ ID NO: 4964 - protein, 232 aa, Enterococcus faecalis
KRSELRMYQLFEKYFPNVVQLKQEFLQSTWETLYMVFWTALIAGVLGVLLGVVLVSTGPSGVLKNPPLYSVLEKIINVCRSIPFIIMLALIQPLTRILAGTTIGTTAALVPLVIGVIPFFARQIENALLEVDPGVIEAAEAMGTSPLGIIFRVYLIEGLPSIIRVSAVTIINLIGLTAMAGAIGAGGLGNLAITRGYNRFQTDVTFMATLIILIMVFISQAISNQLIKKTSH

SEQ ID NO: 4965 - protein, 278 aa, Enterococcus faecalis
QMKKFSKLIGLIGVLAFTIAGCASGSVKDTKTETVKLGVVGTKNDEWESVKDRLKKKNIDLQLVEFTDYTQPNAALAEKEIDLNAFQHQIFLDNYNKEHGTKLVSIGNTVNAPLGIYANKLKDITKIKDGGEIAIPNDPTNGGRALILLQTAGLIKVDPAKQQLPTVSDITENKRQLKITELDATQTARALQDVDASVINSGMAVDAGYTPDKDAIFLEPVNEKAKPYVNIVVAREEDQENKLYQKVVEEYQQEETKKVIAETSKGANVPAWETFGKK

SEQ ID NO: 4966 - protein, 262 aa, Enterococcus faecalis
KIKEAFIMSTTTIQTIQEAIATEKEWIIHLRRHFHQYPEASLKEYETIKRIKEELLALAIPFVEVGETGVLATIEGGLGAGKTILLRADIDALELPDATGAAYASKNPGLNHACGHDGHAAALLGAAKVLKKHQDTFSGTIKLAFQPAEEIGAGARQFVEGNYLEAIDQVFGIHLDSSVPVGKLVGTKGATNASCDIFKIEVSGQSSHVAQPQNGRDAVLAAASIVVELQKIVAREIDPLDSVVVGIGVLQAGTRYNLVTVY

SEQ ID NO: 4967 - protein, 241 aa, Enterococcus faecalis
CIDACDDIQTFKLVVKTIARKHGLHATFMPKPLFGINGSGMHCNMSLFNEEGNVFYDESGEMGLSQTAYHFLGGLLKHARAYTAVCNPTVNSYKRLVPGYEAPVYVAWSGRNRSPLIRVPESRGLSTRLELRSVDPSANPYLTMAVLLQAGLDGIRNELTPPPAVDRNIYVMNEEERQHAQIEDLPSTLHNAIKELRKDQVMIDALGRHIFANFVEAKRMEWAAFRQTVSEWEREQYLELY

SEQ ID NO: 4968 - protein, 1247 aa, Enterococcus faecalis
TRICVQLFYFLDIKDEKNMRKMKTMDGNAAAAYISYAFTELAAIYPITPSSTMAELVDQWSAEGKKNIFGQPVKVVEMQSEAGAAGVVHGSLKTGALTTTYTASQGLLLMIPNMYKIAGELLPSVFHVASRALTTNALNIFGDQGDVMAARQTGFAMLSESSVQEVMDLAPVAHLASIEASVPFMNFFDGFRTSHEIQKVAVLDYEELAPLVNQEKLAEFHRRSMNPNHPSVSGMNQNPDIHFQQRETINPYYEKLPGIVQKYMTEINRLRGTNYDLVTYYGAEDAEEVIVTMGSVAQTIEQTVDYLQQQGRKVGFLNVHLYRPFPIETFLEKVPQSVKAIAVLDRTKEPGAGGEPLLLDVQSAMYEADIRPTIIGGRYGLGSKDVLPNQIVAVFDELMKERSAMKKRFTIGIDDDLTYTSLEVGKPLDLTNPKTYQAKFWGFGSDGTVGANKSAIKIIGDHTDKYAQGFFYYDSKKSGGLTVSHLRFGETPIRSTYLIEHSDFVACHTAAYLHTYDLVKGLKKGGTFLLNTIWNDEQLARFLPNQLKRYLAENEIQFYTINAVKLASEVGLGGRINTAMETAFFKLAEIMPFEQVLPILKEEALKSYGHKSMKVVEKNIQAIDKTVELLHQVPVPAEWRTLEVQPRKRSENVSDFVHEIVEPINRQEGNALSVATLAKNGMTDGRMPLGTAAVEKRGVALEVPEWISDRCTMCNECAFVCPHAAIRPFLADEEEMTEAPEGFIVRDLRGADGLKYRIQVSVKDCTGCGLCVEACPAKGKALVMKPYEEEKEQAMNWAFAMTLRQKENPAKPNTVLGSQFNKPLLEFSGACSGCGETPYVKLLTQMFGDRMLIANATGCSSIWGAAAGVTPYTTNEQGQGPAWSNSLLEDNAEFGYGMLLATQARRERLASKMTKAFSVASDSLRLLMEDWIAHLSESEGTQQRAAKLRAALLEEKTNQPLLEAIYDDQDLFVKPSQWMIGGDGWAYDIGYGGIDHVLASGADVNMLVLDNEVYSNTGGQTSKATPASAIAKFAASGKYASKKDLGMMAMTYENVYVAQIASGANQMQTIKAFEEAEKFPGPSIIIAYTPCITHGLAGGMSQTLKEAKDAVHSGYWSLYRYNPLLREKGKEPMILDFKKPDFSLMKEFMRQQVRFASLESSQPDTAELLFNKTINDAKRRFYNYARLAGQEEKIRAKLEKQSEPEINTPENEKPRVKKERVVDPEAEARRAARRAERAAKRKQREQD

SEQ ID NO: 4969 - protein, 159 aa, Enterococcus faecalis
LFRSILRGEILELKKTISNKIMIILIAIIVAIFAMGWILPIGIDKVTRLSYREYLFSTYTVFTQFGFLMFSFLVSFFINKEYSGKTILFYRMMNTNSLTFYIKKVLTLTVETLGSILVLLFIVSFIFMDFSVILQMFFLLSMISIQYILIVALISFLSC

SEQ ID NO: 4970 - protein, 426 aa, Enterococcus faecalis
STIIVVPYLLYIQLSDGHNLLTILPFVLFYTLRMTGIFLVRGINLSLTSLGLLKISLLLGLAGSLIGIAGAYSFPLYSISGMLLGLSGALLPPSNQSIRFFLKEEGQKISHSNLLTTVLLTAVLFGALFFKATEIGLALLVYALYFLVALVAIKSYPVSLNELEEESAEVSRKELILFVIFFVLLLLLRNGRLLTNAVEFDYAIVGACCFFVVAVLFVSHYGKRGAYKVSLEMNLATLINGIVGNYLFLFGSIYVAGVYGRAHMGIYLYLPYVLGMIFAMIAASKTKQWSNNIPMIGLAGSLGILLLTSWTILGLFLLSFFKSTLNSFLARRYYQETDLPKDSRILIKYTTQTKGSLFHQFILMALMLVTVVGKGGTTQFLLELTGGKGISMQTSQFLTFIKNSNSLLVLLFIAVYFVVVFRQKKR

SEQ ID NO: 4971 - protein, 1233 aa, Enterococcus faecalis
KGISMKKKTFSFVMLSILLAQNFGFAVNAYAVTTTEAQTETTDTAKKEAELSNSTPSLPLATTTTSEMNQPTATTESQTTEASTTASSDAATPSEQQTTEDKDTSLNEKALPDVQAPITDELLDSMSLAPIGGTEYSQTEVHRELNTTPVTATFQFAVGNTGYAPGSVYTVQLPEHLGYSTVSGEVTGIGATWAVDAATKTLSITFNQRVSDTSFKVELKSYLTTEAEPLIKIETPGKNKKTYSFDLYEQVEPIQYNERTRTTGLDGEIFYNLDRTLTGNQTLELLTTETPGAVFGKQDNLEPQVFSYDVDINGQILPETQTLLTPGKDYTLSDNSLGRIAVTVPNMNQQKAYSLSINRTIYLESASDYNYLYSQQYPTTKIGSISLKSTTGTKQTTDFTAKTSQTSKVIADREMRSMSYISFQSKGKYYVTIYGTLTETKVGQQIVLESTNGQEIKNPKFTAYGPLYENVKLEDYFDIKTEGGKLTLTATKDSYLRINISDLTMDFDKKDINLSLSTPVIGPNKAIQLVSDQYIEPISVVNPLNAETAWGNYDQNGAYSSRTTVSVMGSKEKPIQNLEIKVKHPNYLSLRATKEIYFYYKLGTDYTVTPTSDGSVIKFTTPITNEIQIPIGFNYVPDSLPKDKSIPVDTIPITMSAEGLTPVDTTVTTNSKRGSERTLQSSKNQFLVNARNDSFDSLSVRTKIPAGADVLFDIYDVSNDQVDSIYPQYWDRGQYFDKPMTPNSPGYPTITFDENTNSYTFDFGKTNKRYIIEYKNANGWIDVPTLYITGTAKEPQSNNNEGSASVSVQNEALDILSATQAANPTLKNVTKTTVTTKNIDNKTHRVKNPTIELTPKGTTNAQIDLNSITVKGVPEDAYSLEKTTNGAKVIFKDYTLTENITIEYNTVSANAGQIYTETTIDSETLNQMSASKKKVTTAPITLKFSEGDAEGIVYLATATFYTHNVEDENQAIAKVSFELIDNVTHTATEFTTDEKGQYSFDAIMTGDYTLRVTNVPQEYSVDEEYLTGKAIKLVKGDNQLKIPLTKTIDHSRLQVKDSTIYVGDSWKPEENFVSATDKTGQDVPFEKITVSGQVDNTKAGVYPIIYSDEGKEETAYVTVKPDQSKLEVKDTTIYVGDSWKPEDNFVSATDKTGQDVPFEKIDVQGTVNVDKIGDYEIVYKNGKKEAKAIVHVRDDSQLEVKDTTIYVGDSWKPEDNFVSATDKTGQDVPFEKN

SEQ ID NO: 4972 - protein, 112 aa, Enterococcus faecalis
KKLMFRETVNVDKIGDYEIVYKNGTKEAKAIVHVVDDSRLQVKDTTIYVGDSWKPEENLFQQQIPQVTMSHSNKSLFQVKLILAKQAFIQSYTVTKVKKKQPMWPSNPTNLS

SEQ ID NO: 4973 - protein, 242 aa, Enterococcus faecalis
SFTSQGYNDLCRRFMETRREFVSATDTTGHDVPFEQITVSGQVDTSKAGVYPIIYSYEGKEETAHVAVKPDQSKLEVKDTTIYVGDSWKPEDNFVSATDRDGHAISFDKVQVKGEVDTKKTGEYQISYTTEPVNETKPAVQSRLFSMFSNETPRQLTTVATVHVIDRNPTPLPDKNENNQTSSSTNQTTIKSSQYVTHIVKPDKQGRYPKTGEQTNGLYRVLGLVVLLIVIISGIVIKKKRK

SEQ ID NO: 4974 - protein, 179 aa, Enterococcus faecalis
FGGIINEMNQRTIYYGSIGTALFLSSGMLIASVNSYANEATTPGKYTVTYEVDGKIETATITVKENQTELKLKDTFLGVNQAWSPLDNVVFLKDKDGRPLNLENVIIENNVNTQKVSLYFVTFRYESYLSIAKVYVNPTNFAAEGNMLAELPYSQAMIGPERSIIASRQDKEPQTTLEN

SEQ ID NO: 4975 - protein, 83 aa, Enterococcus faecalis
LAQKDQLLPRDRTRNHKQPWRIKNNIFEQERVNKKVLLNDELLKKIDTIAPVEITGGAASGSSQFGTTLSFLSGSLLYGTRRV

SEQ ID NO: 4976 - protein, 149 aa, Enterococcus faecalis
MEFLLLDDRENLKLAIIRKLEQQYSFSERKDRLCKQLAISPYLLERNITEINADLQRFGLINEMEISEKNNEILLSQSLRISSSIIEEYYLKDSLEFNLLKTIFFHQFTSIKKYGEKHGMSRTVVYKIVDHIRKELGQYGIKLSKNLQL

SEQ ID NO: 4977 - protein, 77 aa, Enterococcus faecalis
RSDTMSRVDRYKHIHEKSRPAEHKKTFNPRKSMGEHREEEPEELAESLQEPVYEDSYTEDVAEVRGDIKQIQVVATF

SEQ ID NO: 4978 - protein, 287 aa, Enterococcus faecalis
RSRETMKVGYLGPIGSFTYSATLAAFPEATLMPYASIPACLKAIEQQEVAWSIIPIENTIEGTVNASIDYLYHQAQLPVQAELVLPIQQQLMVAKENQAIWQQSQKILSHPQALAQSQMFLEKNFPEAILEATPSTAYAAKYIAEHPELPFAAIAPKLSAEMYDLTIVEKNIQDLSVNQTRFWVLGSENLAISFPLSEKKITLAITMPSNVPGSLHKVLSVFSWRGINLSKIESRPLKTKLGEYFFLMDLVKDQPDKLIEAALTELELIGAEIKILGDYPIYVLSTL

SEQ ID NO: 4979 - protein, 170 aa, Enterococcus faecalis
RTMESIVLIGFMGAGKTTIGQSLANKLKMPHLDLDTALIEKIGRSIPDYFEKYGEAAFREQETQLLKELSKNTAVLSTGGGIVVGPENRSLLKSFQQVIYLHATPEELLKRITEDTENQRPLAIERSSKEIITLFESRKNFYEECAKMTIDTTNRSPEEIINEILQQLKE

SEQ ID NO: 4980 - protein, 430 aa, Enterococcus faecalis
EVMRVQLRTNVKHLQGTLMVPSDKSISHRSIMFGAISSGKTTITNFLRGEDCLSTLAAFRSLGVNIEDDGTTITVEGRGFAGLKKAKNTIDVGNSGTTIRLMLGILAGCPFETRLAGDASIAKRPMNRVMLPLNQMGAECQGVQQTEFPPISIRGTQNLQPIDYTMPVASAQVKSAILFAALQAEGTSVVVEKEKTRDHTEEMIRQFGGTLEVDGKKIMLTGPQQLTGQNVVVPGDISSAAFFLVAGLVVPDSEILLKNVGLNQTRTGILDVIKNMGGSVTILNEDEANHSGDLLVKTSQLTATEIGGAIIPRLIDELPIIALLATQATGTTIIRDAEELKVKETNRIDAVAKELTILGADITPTDDGLIIHGPTSLHGGRVTSYGDHRIGMMLQIAALLVKEGTVELDKAEAVSVSYPAFFDDLERLSC

SEQ ID NO: 4981 - protein, 375 aa, Enterococcus faecalis
WKKVASIWREKMKKRILIVGLGLIGSSLALCIKKGHPNSEIIGFDNQAEATEFAKKTGLIDEIAESLTSGARRAEIIFLCSPVKATLVQLEELNQLSLETALITDVGSTKVEINQLATKLNMKNFIGGHPMAGSHKSGVTAADERLFENAYYIFTDDHGEKNKQIQELQTLLKGTHAKFITMPAQEHDEITGALSHLPHIVAAALVNESQQLNTTYPRAQQLAAGGFRDITRIASSDATMWTDILLSNRLVLLDLLENWQKEMTTVCQWLTEKNAPAIRNFFDKAKETRAQLPIHKEGAIPAFYDLFVDVPDQPGIIAEITQILGEADLSLTNIKILETREEIYGILQLSFKNQPDCQAAKQILSKKTNYTCYEK

SEQ ID NO: 4982 - protein, 395 aa, Enterococcus faecalis
TEKEEFKMRFITAGESHGPELTAIIEGLPAGLPLSSEEINRELARRQGGYGRGGRMKIEKDQVRITSGIRHGKTLGSPVTLIVENKDWKNWTSVMSVEPVPEKQKKIRRVSKPRPGHADLVGGMKYQHDDLRNVLERSSARETTMRVAIGAVAKKLLAELDIQVAGHVAVLGGIEATIPENLTIREIQERSEQSAVRVLDPSVEEKMKELIDQTKKNGDTIGGVVEVLVGGVPAGLGSYVQWDRKLDAKIAQAVVSINAFKGAEFGIGFEMAQRPGSQVMDEIVWDESTGYTRTSNNLGGFEGGMTNGMPIIVRGVMKPIPTLYKPLQSVNIDTKEPYKASVERSDSTAVPAASVVCEAVVATEVAKAMLEKFDSDSFEQMKEAVKRYRLYTQNF

SEQ ID NO: 4983 - protein, 368 aa, Enterococcus faecalis
KISKDRGVEDMKLTVTLPTHSYDLTIETGALDKIGTWVRSLWQPQRVAIITDETVNKLYGAAVEKELQAAGFETSLIAVAAGEQSKSLEIAQLLYDFLAEQQLTRSDGLIALGGGVVGDLAGFVASTYMRGIHFLQVPTTLLAQVDSSIGGKTAVNTKKAKNLVGTFAQPDGVLIDPNTLKTLEPRRVREGIAEIVKSAAIADVELWHRLSSLENEQDLVAHAEEIITACCKIKRDVVEEDELDLGLRLILNFGHTIGHALENTAGYGVIAHGEGVSLGMIQITQVAEQQGLSPLGTTQELVTMLEKFHLPVTTDRWSEERLYQAITHDKKTRGGQIKIIVLEKIGQAKIVSLPTEEIRAFLNREGGI

SEQ ID NO: 4984 - protein, 176 aa, Enterococcus faecalis
IRGEVSDLVAKYSDILQIGARNMQNFKLLQAVGKTGKPIGLKRGIAGTIDEWLNAAEYIAAQGNFNVIFIERGIRTYETATRNTLDLSAVPLIKKLSHFPIIVDPSHGVGIWDLVPPMARAGVASGADGLIVEIHPDPANAWSDGPQSLNEKTYLRMMKEVHIIEKAMKEINALED

SEQ ID NO: 4985 - protein, 364 aa, Enterococcus faecalis
TKGVKRMNRVVITGYGVTSPIGNEPETFLESLKTGKNGIGPISKFDVSETGVTLAAEVKDFPMEKYFVKKDGKRMDKFSLFGIYAALEAMAMSGLDTSQLDVDRFGVMVGSGIGGLETIQNQVIRMHDKGPERVAPLFIPMAIGNMVAGNIALRVGAKGICTSTVTACASATHSIGEAFRNIKHGYSDVIIAGGAEAPITEIGISGFASLTALTKATDPEKASIPFDKERSGFVMGEGAGVFILESLDHALERGATILGEVVGYGANCDAYHMTSPTPDGSGAAKAMVLAMEEAGISPEKIGYINAHGTSTQANDTAESKAIEMALGEAAKTAYVTTTNNFTGNPLRPPRLELKGMATPKCLYN

SEQ ID NO: 4986 - protein, 246 aa, Enterococcus faecalis
KMELTGKNVFITGSTRGIGKAVALAFAKEGANIVLNGRSEITPEQRQEIEAFGVKCIGLSGDISDFDAAGEMIQATVDQLGSIDILVNNAGITNDKLLLRMTKEDFNACLDINLVGTFNMTQQAVKRMMKQRSGRIINMASVSGLMGNVGQANYAASKAGVVGFTKSVAREVAPRGITCNAIAPGFIQTEMTDVLSEKVKTQMNAQIPLQTFGQVEDVAATAIFLAKSPYITGQVVNVDGGLVMHG

SEQ ID NO: 4987 - protein, 315 aa, Enterococcus faecalis
QKMRCRMKTAILFSGQGAQYQGMGEELYHQEAIVRETFDEASHILGYEMAELCFTENERLNETEYTQPAILTVSVAFYRLLQQKGLTPDVVAGLSLGEYSALVASGALRFSEAVALVQKRGQYMTEAAPQGTGKMVAVMNAEREVIEKACQEASAFGIVAPANYNTPQQIVIGGEVAAVDQAMTLLKEAGVKRMIPLNVSGPFHTALLQPASKKLAQDLAKLNFQTMQIPVISNTTAEIMPQEAIQALLEKQVMSAVRFEDSIETMKAMNVGTMIEVGPGKTLTGFVKKIDKTIEMHRVEDVATLTETLTALTGR

SEQ ID NO: 4988 - protein, 332 aa, Enterococcus faecalis
MKCTYLRTKGRIKSMNQELCELLGINYPIFQGGMAWVADASLASAVSNAGGLGIIAGGNAPKEVVKKEIKKVKELTEQPFGVNIMLLSPFADEIVDLVCEEQVPVVTTGAGNPAKYMARFKEHNIKVIPVVPSVALAKRMEKIGADAVIFEGMEAGGHIGKLTTMSGLPQIVDAVSIPVIAAGGIGDGRGMAAAFMLGAEAVQLGTRFLIAKECNVHPDYKQKVLKARDLDAVITCQHFGHPVRTLKNKLTAQYNQLEKQELQKEVPDLEMFEKIGQGALRKAVVDGDMDYGSVMAGQIAGLIKKEETAQEIIDSLMSECKAIVHKMNQRWG

SEQ ID NO: 4989 - protein, 326 aa, Enterococcus faecalis
KVRIPMKNYARISCTSRYVPENCVTNHQLSEMMDTSDEWIHSRTGISERRIVTQENTSDLCHQVAKQLLEKSGKQASEIDFILVATVTPDFNMPSVACQVQGAIGATEAFAFDISAACSGFVYALSMAEKLVLSGRYQTGLVIGGETFSKMLDWTDRSTAVLFGDGAAGVLIEAAETPHFLNEKLQADGQRWAALTSGYTINESPFYQGHKQASKTLQMEGRSIFDFAIKDVSQNILSLVTDETVDYLLLHQANVRIIDKIARKTKISREKFLTNMDKYGNTSAASIPILLDEAVENGTLILGSQQRVVLTGFGGGLTWGSLLLTL

SEQ ID NO: 4990 - protein, 146 aa, Enterococcus faecalis
MEPILETVNDYLVSVFNDILTIEESELKKSQFNDLSITEMHTIEAIGMYKKKTSSEVAKELSITVGTLTVAINNLVKKGYVERLRSEDDRRVLKLGLTKKGKLLFRVHQHFHREMVKNILKGMEQEEEQALLRALKNLHDFLQEYK

SEQ ID NO: 4991 - protein, 157 aa, Enterococcus faecalis
ILGGMANTFFQHKADRYAEEGNYKGVERCNVLGIFPWTISRVIPVFIGLAFGEQVVNAINDWIPIWVMNGLKAAGAILPAMGIAILMRYLPIKTYWPYFIIGFVLLAYGAQFFSVLGVALVGLALAAIYVMNHNKGGAATTSGTVIYEDDEEVEIDD

SEQ ID NO: 4992 - protein, 296 aa, Enterococcus faecalis
IITKAAQLQQVARLFTKMMRRLRLMTNKLTKKDINKVYVRNLFGYQWGWNYEKMQGLGYAWVMMPALKRLYSEDPVAMKKALKTHLGFMNTTPAMSHLIVGADMALEEEVGIEDETAITGLKTGLMGPFAGVGDTIFIAIYRAIVFSIAAYMAQGGQVVGLLIPLIAGAVVLWVRYKFTWIGYHQGKKIATEFADKMKLFTQGAAILGLTVVGGLIPSVITYKLDLTYKMGDVTLSVQEMLDKILPALIPLGIVLLSYWLLGKKKMNSTRLIFVLILIGMVLGNLQPMLAWVGGLF

SEQ ID NO: 4993 - protein, 162 aa, Enterococcus faecalis
ERFIMTIVHARVDERLIHGQVATVWTNTVGAQRIMVVNDAAVKDQLQIGALKMAKPAGVKLSILSKRKAIEKILAGNYDEEKVFLITKDIADMAALIDGGVPLQSFNVGNISQKEGSRAIKKSVALTDEDIQTVRRLTDNGVTITAQMIPSEPNEAILTFIK

SEQ ID NO: 4994 - protein, 290 aa, Enterococcus faecalis
NRNGDEKMEPIRSIRQKYKDFSKVNKRIADYILKDPTRLLSLTANEIASNSETSPASVTRFSKQLGFDSWEELKLSIAAVQAASNDKKDIDPIVAVDDSVDTICMKVESLLNATIEDLFYTVDKQALERAIAHVKKAEKIHLVGIGASSLTTYNLYHKFNRAGRQAIFNYDSHMMLEFLNYATAQDILITVSYSGLTKEALIACEIAKNRGATVIFITSNDGENVRSLSDEVLLVPNNEHLIRVGAISSIASSMAIGDVLYLGSIQDDLDTEIERNMIETSQLVSRLKEK

SEQ ID NO: 4995 - protein, 313 aa, Enterococcus faecalis
NESTCQPSKREVGVCKQMNLEGLTTEARNEATKKIDQVSTLEMVTLINQEDQKVAQAIEKVLPQIAAAIDAAAERFKKGGRLIYCGAGTSGRLGALDAIELTPTYSVSPERAFGILAGGEKAMYQAIEGAEDSKELAIEDLTQHQLTARDVVIAIAASGRTPYAVSAIEYGKKVGALTISVTCNNQSPMNQLAEIGIAPIVGPEVITGSTRMKAGSAQKMVLNMFSTGIMVKVGNIYQNLMVNVQPTNEKLIQRATNIIKEAAEIEESQAKEYLEAAQLEVAPAIVMAKAHVDFQKAKQLLAEHDGRISEVLA

SEQ ID NO: 4996 - protein, 143 aa, Enterococcus faecalis
  MISC_FEATURE (141)..(141): Amino acid 141 is Xaa wherein Xaa = any amino acid.
TMNQIAIQETIQRLINQQVVPGVAWGTITEDSLSEQYTGFLGNTGPFARQKISSASLYDLASLTKVIGTTNRMLQLIDTNQLTFSTTVGEILPDYQGLSCSIGELLLHQSGLPADVVDKKNVTKKSLQEIHLTHSLSERRXTT

SEQ ID NO: 4997 - protein, 797 aa, Enterococcus faecalis
VQFVVDKSLSLIAYYLGGLFTPLVFFFNNQNMPDALYFLTLLKIGSAGLSFWFLAKQTFKIPKWSHVTLSVSYALMSFIVAHSELIMWLDAFIYLPLVILGIHRLMDQRKPTLLFVSYFLLFITNYYFGFMIGLFSFLYYFARTFTDWQRYKSRIVAYFTTSLLAGGASMIMVLPAVLDLRTNGETLSEITTFKTEATAFLDIIMKNMIGVYDTTKYGSIPFIYIGLLPLIFCLFYFVTKEVPLKNKLLFGSLFVLLSASFYITPLNLFWHGMHAPNMFLFRYSFLFSFLVILLAGYGWDKFEKDDLGVLSGLILILLAIFALAMGTKGATSYTYVTLTSFVLTATFLLLYFFGIAFYQLKKAPMQYLVILLLLLVSGEAIINTRAMVTGILDDWNYASRSLYSEPYPDLKNLVDQTKKENDTFYRLENLNGVSANDGINYGYSGISMFSSVRNRHSSTYLNALGFRSRGTNLNIRYQNNTLLMDALMGIKYKIAENNPMKFGFERQAAAGKYQLYRNENALPLGFLADKEIYNVRQPLNDNLGSQTNLLNALANTNERYFTFYQPTMTLQNNVTITQNTAGVTFTEKQHNVAKEISYTVNVPANTQAYLSLFPTDFAQLESSTATVTVNGSSQQSQIGITGQYYNLGYYPKDTTVNFKVSFYGTKAVSFVQPQVVGLNTNAFEKAISAVQEKGVDLTTGKRSASGTFTADKDQVLVTTIPYDKGWRVKIDGKKVTPKAFKDAFLSVPVSAGTHTIQFSYLPEGLIPGIVLFVLCTGGFVAYVTLIPARRNRKKEDK

SEQ ID NO: 4998 - protein, 71 aa, Enterococcus faecalis
TPIIFFIIISKKAVASVLKVVISERVSPLVRKSKTAGKTIIMDAPPAKREVVKYATIRDLYRCQSVNVRAK

SEQ ID NO: 4999 - protein, 826 aa, Enterococcus faecalis
  MISC_FEATURE (52)..(52): Amino acid 52 is Xaa wherein Xaa = any amino acid.
TYRSQHDLGGYFSPKEQQIRAFNWVCLGGLLGVIPLLLNDYVVVKLLEKEGXPPMKRMDWLTSAWVTNTINNLAGFGGVVGATLRINFYGKDVPRGKVVATVSKVALFLISGLSILSFVAFVDLFFIRTQNVFREYWVWLLLGSLIAPALWFFTYLKRRTLFKTFFPKAVLLLFGASLGQWLGGMFAFLMIGRLMQVPVSMVSVYPMFVIATLIGMLTMVPGGMGTFDVLMILGLSQLGIDRSQAIVWLLYYRLFYYVTPFMTGVILFLQQAGMKVNQFFDNLPRLFSQKVAHFILVAALYFAGIMMVLLSTVTNLSNVSRLFQVLLPFSFNFLDQTLNLFVGFLLLGLARGISMKVKKAYWPTIILLGFCIVNTVARTTSWQLIAVYAVILLAVILARKEFYREKFVYSWGALTVDSILFGCLFIGYAVAGYYAARPAGGNQVINHFLLFPSDDVWFNGLIGLSISLIGLFFLYQYLAETTVTLGEGFEKARLTRFLEKFGGNEGSQFLYLKDYGHFYYQEEGEDQVLFGFQMKFNKCFVLADPIGQREKWTAATLAFMDQADLLGYQLVFYRISEEYVMNLHDCGFEFMKVGEEGLIQFDEPSTVNQTAWTETVTEKIAAEAADFQFEFYPETISDALYQELERVSADWSRNQKERYFIGGRLDPEYLKCSSVGLVRQKQTVIGFITGKEMEKGKSISYDLLRIRSDAPAFTREYLFTHFIETYQQQGYQLIDIGMAPLANVGESKYSFLKERFVNIFYKYSYQIYAFQDTRKRKEQYVTSWQPRYFAYPKRTSVLFAFVQLSLLITKGRHQSVSLVEEAMTEI

SEQ ID NO: 5000 - protein, 90 aa, Enterococcus faecalis
PNEAPNNRSTAFGKNVLNNVRRFKYVKNQSAGAIRLPNNNQTQYSRKTFWVRIKNKSTNATKDKIDNPEIKNRATFETVATTLPRGTSFP

SEQ ID NO: 5001 - protein, 159 aa, Enterococcus faecalis
EKIAFRKWLQYNGKIETNKITKSNNLSFTGGKEMKTIKTKQAPQAIGPYSQAKIVNGLLITSGQIPLDPETGKVVGTTIKEQTNQVLKNIQGILTEAGSDFAHVVKTTCYLQNMADFTAFNEVYAEYFSAEYPARTTIEISKLPMDVLVEIEIIAEVVA

SEQ ID NO: 5002 - protein, 417 aa, Enterococcus faecalis
SIRDDFRLEKRQKVKSVSFDKAIDRRGTYCTQWDFVEDRFGEADLLPFTISDTDFAVPEAVLATLQERLNHPVFGYTRWNHPQLKEAIQTWYQTRFQTKIEEHWIMYTPTVIYGISALIQLLTNEGEGIILQTPAYDAFFKVIQENKRQVVANELLYQEKRYSIDFIDLEKKLAQPENRCLLLCSPHNPTGRVWEQWELERIVSLCQQYDVFLLSDEIHMDIVNKGHVHRPITQFDYKKSAIITSGTKTFNFPGLIFAYALIPDNELRDAFQLKLKNADGLSSTSILGMLATMTAYQKCGTWVDELNDYLAENQRYVKDFLQTYLPKIKVTELEATYLMWLDVSAAVPDVARLQAALVSVGKVAIMDGSIYGGNGQRFLRLNIGCSQAKLHEGLERMRQGFEAVLQKDGTASALRNN

SEQ ID NO: 5003 - protein, 523 aa, Enterococcus faecalis
EMAVKKKKATFWEFFQGLGKTFMLPVALLAFMGILLGLGSSFSSESMIETIPFLGKPAVKIIFQFMSTIGGFAFAYLPVMFAMAIPLGLVRKEKGIAAFSGFVGYTVMNLAINFYLVQTNRLVDPEQLREAGQGMVFGIQTIEMGVLGGIIAGLIVYKLHNRFYTVQLPDSFAFFSGARFVPIITSLVMAFVGLVIPLVWPLFALMIMAIGQLIQRSGIFGPFLFGSGERLLLPFGLHHILVSMIRFTEAGGSAVVAGKEVFGALNIFYAELQNNLPISPSATAFLSQGKMPTFIFGLPAASLAMYHTAAPANRHKIKGLLLSGVIATAITGITEPIEFLFLFISPLLWLFHVIMTGLGFMVMALLGVVIGNTDGGLLDFVIFGLLQGTYTKWWWVLIVGAICFVVYYFVFKTVIVPFDLKTPGRDKVLDETEYTDQEVQYKKTGGYDAPGILAALGGQENIQAIDNCITRLRLVLADANKVDDDKLKQLGALGVVHLDAQNVQVIIGTKVTTVRNQLEMILG

SEQ ID NO: 5004 - protein, 243 aa, Enterococcus faecalis
EVIMIELVNVSKVYQETHALKNIHFSVQPGEIVGIVGKSGSGKSTLLRLLNLMEQPSEGEIRIDGRNVQTFSKKEVRQQQQQMGMVFQHYNLLENLKIYDNVALPLKLLKEKQPEKIERLLTFVDMAHKAEAYPAQLSGGEKQRVSIARALSRNPKWLLCDEATSSLDEENTESVVRLLHKTHQEFRPTIFFVSHELETVKRLCNRILVMEKGQLIGEFLNNPQQYEEEPLSYLEKVERSLRP

SEQ ID NO: 5005 - protein, 239 aa, Enterococcus faecalis
GRTAFLFRKSGKEFASMTFSETFAEYWPSMLIGLKETGIMMSISMAICLLVGLPLGLGLFLANPKVKGHQPWLYWVLNFIVTVIRSFPYLLFVIALIPVTRSVLGKAFGPIPSSVPLSIVAIAIFARLVEQVLLDVPEEIYFLANSLGTSKVQYIWHFLLVEARSGLVLAYTTTTVSMVSYSTVMGVVGGGGIGDFAVRVGYQRYEYGIMYVAIVIMIALVFILQMLGNFIAQKLDKRK

SEQ ID NO: 5006 - protein, 278 aa, Enterococcus faecalis
EDKRMKKFYLATFAVIATVILAACGGNKQADQKEDKEITVAVQLESSKDILEIAKKEAEKKGYKINIMEVSDNVAYNDAVQHDEADANFAQHQPFMEMFNKEKKADLVAVQPIYYFAGGFYSKEYQDAKDLPENAKVGIPSDPTNEGRALAILNANGVIKLKEGVGFNGTVADVVENPKNITFESIDLLNLAKAYDEKDIAMVFCYPAYLEPAGLTTKDAILLEDKEASKHYALQVVTRKGEKDSEKIDGFKRSDEHLRVCLNTSRHILKGANIPAFY

SEQ ID NO: 5007 - protein, 594 aa, Enterococcus faecalis
EGGAGVVELFILMMERVGLIILLAFLLVNVPYFKRVLLSREKMSSKVQLILIFGLFAIISNFTGIEIAKNQIVPNNLLTYLSSNASIANTRTLVIGVSGLVGGPIVGSAVGLIAGFHRVIQGGGHSFFYVPASLIVGLIAGFLGSRMAKQTVFPSAGFSAIVGACMEMIQMIFIFFFSGDLSDGATLVRFIALPMILLNSVGTFIFMSILTTTLKQEEQAKAVQTHDVLELAAETLPYFREGLNKNSSKKVAEIIKHYTKVSAISMTNSHQILAHVGAGSDHHIPELEVITELSREVLRTGRMTIAHAKEEVGCSDPNCPLQAAIVIPLFSHQQIVGTLKMYFTDPAQLTHVEEQLAEGLGTIFSSQIELGEAEVQSKLLKEAEIKSLQAQVNPHFFFNAINTISALMRKDSEKARKLLLQLSKYFRGNLQGAVQTTIPVSQELEQVKAYLSLEQARFPNRYQVTFDVEEAVASEKVPPYAIQVLVENTIKHAFGSRKENNQVRVVVKAKQHKLHVDVYDNGQGIPEERRLLLGKTTVTSEKGTGTALENLSRRMANLYGSEGCFLIENLETGGSHVHLEIPMEQEELDARINR

SEQ ID NO: 5008 - protein, 242 aa, Enterococcus faecalis
MHVLIVDDEPLAREELSYLVSQHPQVTSVAEADSVAEAMEEMMDQKPDLLFLDIHLTDESGFDLAEKLTHLKKAPYLVFATAYDQYALKAFQVNAKDYILKPFEEEKITQVIEKASKEMGQAVPENTAEKGPKSEAIPIQREDRIYLVAPEDIYLVSVEERQLSIFVDQQVYKMTGTFNSIEQKLPATLFIKTHRSFILNRTKIQEIQPWFNNTLQVILTNGSKVPVSRSYVKEFKEKLGLS

SEQ ID NO: 5009 - protein, 148 aa, Enterococcus faecalis
KTDKRERRRMEKKVYSFLQQAAVFAIIMLIANGLAFISPIPMPASVIGMVLLFIGLCTKVVKLEQVEGLGNSLSTVITFLFVPSGISLVNSLGIMQQFGVQIIFVILVATLALLATTGWTGAFLLHMKDARKEKEPAATKKAKGEVRA

SEQ ID NO: 5010 - protein, 345 aa, Enterococcus faecalis
SARLEKIGMRLIVDIQKELKSHTLQIQFETKTQTTGILGASGCGKSMLLKCIAGVETADKGQIVLNDQVLFDTEKKINLSPQQRKIGLLFQQYALFPHLSVVENLTCVTKDLQLVTQLLASFHLTKVQQQYPSQLSGGQRQRVAFARMLAAQPAYLLLDEPFSALDAPLKEELQIELQQRLSNLNQHALIVSHSLDELYKLCQSLVIITKNQTLFGATNQLFNQPQTIEAAKLTGCKNIWPVKRIDAHRVQVIGWQQTLMVTQEVPISCHSIGIRAHDFTTEPQATNQIEVHHLQTLSAPFEQSAWFQHQQTKIWWKGSNRLNPKVITQLSIPPTAMTNDSSPRI

SEQ ID NO: 5011 - protein, 230 aa, Enterococcus faecalis
VNKVGGKMDVRPILLSFQTAIIAILFTFILGTGVAYIVFRLKNRKLKILLNSLFTLPLVLPPTVFGFFLLTIFGVQQPVGQFLLDFFAIQVVFSWPATVIAAVAVSFPLMYRSALTAFEQMDSELLAVAQTLGFSESRYFRKIALPLSMNGLLAGGVLAFARGLGEFGATTMLAGNIAGKTRTLPLAIYSAVASGDWRLANQYVVIMLLLCLIILFFTEFFSQRAWRRSE

SEQ ID NO: 5012 - protein, 272 aa, Enterococcus faecalis
KKRGVQMSKQKKAVFLLSLFSLVALIAACTNQPQKETVSTKKEEITLAAAASLESVMEKKIIPAFEKEHPDIQVTGTYDSSGKLQMQIEKGLKADVFFSASTKQMNALVAEKLINKKSVVPLLENQLVLIVPNQDQAKWHDFSDLKKAQMIAIGDPASVPAGQYAEEGLKALGAWSYVEKHASFGTNVTEVLEWVANASAEAGLVYATDAATNSKVAIVAAMPEAVLKKPIIYPVGKVAASKKQKSADAFLNFLQSQQCRKYFENIGFKLTK

SEQ ID NO: 5013 - protein, 324 aa, Enterococcus faecalis
TMKTIRTEEAVGLPLSHDITRIDYGKTKEVCFKKGHIVVQEDIPILLSLGKKHLFVSLDPAEIHEEEAATFLYNLLTDDSCQPSEVHEGKIVAKASTRGLLKVNREKLIALNEIEGLALSTKVTNIEVQKDEKVAAFRVIPLTISKSQLEKARQLSTSEPLISVKPFKKIRVGIVTTGSEVYTGLVEDAFYPVLKAKFSAYPLVTIVKQEIVDDQPQKITVAIKKMLAQGVDLIVCTGGMSVDPDDLTPLAIKQTGAEIVTHGTPVLPGSMFLLAYKGEQTIIGLPGGVLFSEKTVFDLLLPRLMAKEVIKKSEIIDLSYGGYL

SEQ ID NO: 5014 - protein, 161 aa, Enterococcus faecalis
TLFKVGIVTLSDRCFQGLAVDQSGPLIREQLPALYQVTKQTILPDEENQLVELLQEWSKTCDLILTTGGTGLSERDRTPEATLRVAERIIPGISEGLRQLSLEKTPFAMLSRGVSVQRGRTLIVNLPGSPKSVTEHLHFLLPVLPHALDLITNKKIIHDEE

SEQ ID NO: 5015 - protein, 165 aa, Enterococcus faecalis
KTSFLGTTRRTTIYVTNRRVSMKTGEIIAINISPRRGTQKKEIPEVNLIKGFGLENDAHGGNWHRQVSLLSFEEITAFNEKGARVGNGAFGENIIVSGIDLRQLPVGTKMKIGDSELVVTQIGKECHKHCQIYARVGDCIMPREGIFAVVVTEGHIKKGDQLDVV

SEQ ID NO: 5016 - protein, 221 aa, Enterococcus faecalis
LVRLKGLKEAGLDGINISLNILDPEEFREITRVGQLRNDLAGLEQAIDVGLPNIKINTVARKELSEATIVELAEIAKKETVHLRFIEMMPIGLGKEHPGKQQEEVEAILTKYYGTLQPYQKPLGNGPASYYALKDFKGKIGFISALGHCFCETCNRIRITADGHLKTCLHSADGYSLKEALAMEQTAELLGIIKSGIACKPEKHLFLEQQGEQRFMSQIGG

SEQ ID NO: 5017 - protein, 118 aa, Enterococcus faecalis
VNSMKDAFNREIDYVRLSLTDRCDLRCTYCMPATGLCFLKKEQLLTDDEIIFLLRILAKEDIKKVKLTGGEPLVRPNLLSLIKRIKQISCIEKVTLTTNGMKLAREAQGIKRGGLGRH

SEQ ID NO: 5018 - protein, 172 aa, Enterococcus faecalis
GGEMVQSKEFTHLNTQGEVHMVDISEKNDTERTALAYGEIHMLEATAKAIQTQMIKKGEVLQVARVAGITAAKRTFEWIPLCHLVALTKCEIQFDWRNQTCLEVRCFTKTVGSTGVEMEALTGVQAALLTIYDMCKAIDRGMTMTNIGLLQKNGGRSGHFIRSSIKSKESDE

SEQ ID NO: 5019 - protein, 108 aa, Enterococcus faecalis
RHTVLRVKSREEGGERAPFGLDNVLALMYSAKTLHFFGQGGSSIVAFDSFHKFIRTNYRCNYIFDYHMQLSFVTKLTSEDCVYIFSHSGKTKESINLARQVKKTNAKM

SEQ ID NO: 5020 - protein, 130 aa, Enterococcus faecalis
DWRNVLMKNHYLDQRIRIKKPNLSLTEKKISDYFVHSESLLTQMTLESLANEIGVSQSSVYQFVKKIGYSGFQEFKIDIARNSNYQPTFQNVNSVNGADDISPDDDSITIAKKVLQANIYSLSNATQFCV

SEQ ID NO: 5021 - protein, 320 aa, Enterococcus faecalis
SFTLFFLSFMIEVSKEAGERKMDIGFIGLGKMGLNMALNVHEQGWPIIGFDVTKEARATAREQGLSVVDSLSELLKALNKRKVIFLSTPAGQITNQLVAELVEQLAPEDIIVDSGNSNFHDSVANAQLAKEKGIYFIDCGTSGGIKGAREGACLMVGGAPEAVKVLTPFFEDLACEQGYLYAGKSGAGHYLKMVHNGIEYVMMQAMGEGFNLLEAAEYDFALEKVADVWNHGSIIEARLMGLAKEVFAENPTLANLEGKVAANGEAKWMIEEALRLEMPVPTTALSLFTRNESMLANHFSNKVVASLRQGFGGHEVVKSQ

SEQ ID NO: 5022 - protein, 337 aa, Enterococcus faecalis
RSLVMLKKQKIAIVNSSSFGQIFPEHLTRLEKIGTVKHFTVDSEIGGKELAERLQGYTIIIASVTPFFTKEFFEHKDELLLISRHGIGYNNIDLDAAKQHDTIVSIIPALVERDAVAENNVTNLLAVLRQTVAADASVKADQWEKRANFIGRTLFNKTVGVIGVGNTGSCVVETLRNGFRCDVLAYDPYKSATYLQSYGAKKVDLDTLLASADIICLCANLTEESYHMIGSAEIAKMKDGVYLSNSARGALIDEEAMIAGLQSGKIAGLGTDVLEEEPGRKNHPYLAFENVVMTPHTSAYTMECLQAMGEKCVQDVEDVVQGILPQRAVQEVSRYVS

SEQ ID NO: 5023 - protein, 374 aa, Enterococcus faecalis
LRRRRSMLTDLKVKVGPQFYRYHEGALASVPSLFKEYHAQRILVVHGTVSFEKAQPFLPFLADSEYQFFYHTYTGECSYFGAEQISQQIKEHQIDFLLGVGGGKLADLVGYSAHLNNLNFGLVPTLASNCAPWTPLAVMYQENGAAEGKTEHFFRQAAFLITDPKLLLDAPRDYFVAGLADTLAKWYESETILRQAHLQGEPFLQLAGATAKLSQEAIMRDSKAALAAMDEGKLTPEFVHLSEIVFAVSGLVGGFGDKYARNAAAHAMHDAMSKFLPKSHDYLHGEKVAYGIFYQLALEKRWAIIDALIPFYQELNLPMSLRQMGLYPKEEAVLDAMVQFIDSKEKVHLIPIEISEERLRQGIKELEKYIQNQG

SEQ ID NO: 5024 - protein, 270 aa, Enterococcus faecalis
EGGTMETLSVLQSLIMALWVAAIMSRWLGGGATLTLRFSPLMTGLVAGLVMGDVPKAMIVTAALQMIYMGVFSPGGSMPAEPSIAAAIAVPVALLGNLKPEAAIAVAVPVGLLGSYLYQFRFFINTFLGKYTDRAVAELNSKKIARSIIWYPTIASFILFVPLVFFALYLGAPVIADIIKALEGTVVIHVLEVVGGGLAAIGIATTVYVIGRKDFLVFFFLAYFMSIVFKSLEITMVTYAIFWRNYCVNFCASPKRQTCSRKCWFRQCHH

SEQ ID NO: 5025 - protein, 239 aa, Enterococcus faecalis
YAMMPLLKKLYKDDEQLKAAYMRQLLFFNTQLSWGGEVITGLMASMEQERAKEEHEGREIMMQDDLMYNTKAGLMGALAGIGDAIDSRTVQYIFIAIAVPWAQQGSALGAIFPFVAFALYQVLLGVFFARQSFKMGRNATGLMQSAGIQKAIEMLSVLGLFMMGILAGNYVKVSSTLQFKLSGREFVVQDILDQIVPGLLPLAVVMGVYWFYTKKGLKVTQALLWLTGILIVLATVGIL

SEQ ID NO: 5026 - protein, 175 aa, Enterococcus faecalis
KEKDVNQMGVVNLARVDERLIHGQVMVTLSQKSGVNSIFVVDEVVAKDKFMRDLYKSAGSRTGQKTIVITPEKAKFYWDEYQFKEYNCILIAKTVSVIYDLVKHGVPMKELNIGGIAQKNPEKDLLVTKSVYLNKEDAEKLKELHEVYGVEDIYFQATPSAPKTSLKEVLGKFNL

SEQ ID NO: 5027 - protein, 307 aa, Enterococcus faecalis
MDYKTYDPDLWNAIAREEERQENNLELIASENVVSKAVMAAQGSILTNKYAEGYPGKRYYGGCEFIDIVENLAIDRAKELFGAKFANVQAHSGSQANTAAYLSLVEPGDTILGMDLSAGGHLTHGSPVNFSGKTYNFVSYGVDPSTEVIDYDVVRILAREHRPKLIVAGASAYSRTIDFKRFREIADEVDAKLMVDMAHIAGLVASGLHPNPVPYADIVTSTTHKTLRGPRGGLILTNSEELAKKVNSSIFPGIQGGPLEHVIAGKAAAFKEALDPSFAEYSQQVIANAQAMTKVFNQAPDVPPRGR

SEQ ID NO: 5028 - protein, 345 aa, Enterococcus faecalis
KERFAMETKKLTKQEIAQAAAAIQAGELVAFPTETVYGLGADALNEAAVKKVYQVKGRPSDNPLIVHVNNVEMVKKYVATLPEVATKLVSAFWPGPLTLIFNVPSDTFSKTVTGGLETVAFRMPDNQATLALIEQANVPLVGPSANTSGKPSPTSAEHVYHDLQGKIAAILDDGPTQIGVESTVLDLTAEDGVPVILRPGAITKEQLESIIPQVKIDTHLISETAAPKAPGMKYKHYSPDAEVWIISGQTAEWQAAIQQAKEQQEKIGLFLSDEQAAQLDTENAFVYSYGAETVENATKELFAGLRALDEQGATTIFAQGFAETGLGTAYMNRLKKSANQKFFEK

SEQ ID NO: 5029 - protein, 281 aa, Enterococcus faecalis
KRCKMAKRYFEVLNWASSFLEAQGKEGYAIHYVFLERKGWDKTQWLLHMQEEMPQEEEEQLKTDLAQLLTDYPAQYLLGQAEFYGHSFIVNEHTLIPRPETEELVERCLKANPDTPLTVVDVGTGTGAIAVSLKLARPNWRVIAIDLSEEALTVAKQNAQALGAGIEFYHGNGLQPVASEKIDLLISNPPYISEQEWYLMDASVRTYEPKTALFAENNGLALYQQLIHESQTMLKADGKIYFEIGFQQGAALQELLSAAYPQKTIKIEKDLSGNDRLAIAE

SEQ ID NO: 5030 - protein, 364 aa, Enterococcus faecalis
RTVRRDTMYDQLQSIEDRYEELGELLSDPAVISDTKRFMELSKEEANTRETVEVYRRYKQVVEGISDAEELLSENLDAEMAEMAKEELSDLKKEKEVLEDRIKILLLPKDPNDDKNIIMEIRGAAGGDEAALFAGDLFNMYQKYAEAQGWKAEVLEANVTGIGGYKEVIMMISGDNVFSKLKYESGAHRVQRVPSTESQGRIHTSTATVVVMPEAEEVEIELADKDIRVDIYHASGAGGQHVNKTASAVRLTHLPTGIVVAMQDERSQLKNREKAMKVLRARVYDQIQQEAQSEYDANRKSAVGTGDRSERIRTYNFPQNRVTDHRIGLTIQKLDQILAGKLDEIIDALVLYDQTSKLEEMQNG

SEQ ID NO: 5031 - protein, 200 aa, Enterococcus faecalis
RKGVVNMAQLFFKYGAMNSGKTIEILKVAHNYEEQDKPVVLMTSGLDTRDGVGKVSSRIGLRRDAIPIFEETNVFDLINDLSYKPFCVLVDECQFLNKHHVIEFARIVDELDIPVMAFGLKNDFRNELFEGSKYLLLYADKLEELKTICWFCHKKATMNLHYIDGNPVYEGDQVQIGGNEAYYPVCRKHYFHPKTVNEEQ

SEQ ID NO: 5032 - protein, 87 aa, Enterococcus faecalis
FLTYFTIFFSKKALFLARMVVHFSEKNRIYAKVILVGLFILQLMILLVCNKKARNCSYLTTISDFLMLVIFEQRQILLIAYLLDDHK

SEQ ID NO: 5033 - protein, 198 aa, Enterococcus faecalis
IGDAVRGEGAISVSQKGERFVNELDTRDKVSAAIDALPEKSDYLVFDQGVRDRAKAIDFYDQKGFVAKGETIEELTEKIGMLADTLKATIDTWNQDVNAKDDKQFGRTTGMEADLSTAPYYAIKIAPGIHHTMGGVKINTKTEVLREDGTPIKGLYAAGELTGGLHGQNRIGGNAIADIIIYGRQAGTQSAEFASAQK

SEQ ID NO: 5034 - protein, 66 aa, Enterococcus faecalis
QPGVFGPPGNSLTQYQPEWKNYVKKDPEATTGDGIQMIQQVGDALVQYERNSNSPKCSTRRCSLNW

SEQ ID NO: 5035 - protein, 640 aa, Enterococcus faecalis
NIYLEGKKFMSEEIKENIQDVNLTSEMKESFIDYAMSVIVARALPDVRDGLKPVHRRILYGMNELGVTPDKPHKKSARIVGDVMGKYHPHGDRAIYESMVRMAQPFSYRAMLVDGHGNFGSVDGDGAAAMRYTEARMSKIALEMLRDINKNTVDFQGNYDDSEQEPVVLPARFPNLLVNGTTGIAVGMATNIPPHNLSEVIDATSLLMDNPDVTTNELMEVLPGPDFPTGGLVMGKSGIRRAYETGKGSITVRAKVELTEMPNGKERILVTELPYMVNKAKLIERISELHRDKRIEGITDLRDESSREGMRIVIDVRRDVSASVVLNNLYKMTALQTSFGFNMLAIEKGVPKILSLKRILENYVEHQKEVITRRTIFDKNKAEARAHILEGLRIALDHIDEIIAIIRGSQSDDEAKATLIERFEFSDRQAQAILDMRLRRLTGLERDKIENEYQELLKFIADLEDILARPERVIEIIKTELNDVRTKFGDARRTELLVGEVLSLEDEDLIEEEEVVITLTNNGYIKRMANSEFRAQRRGGRGVQGMGVHDDDFVKNLVSCSTHDTLLFFTNTGKVYRAKGYEIPEYGRTAKGIPVINLLGIDSAEKIQAIISVEGKAEAGKYLFFTTLKGTVKRTPVTAF

SEQ ID NO: 5036 - protein, 666 aa, Enterococcus faecalis
TRYFLCSTRQDRKEFSDMTEEEKNMRERAQEYDASQIQVLEGLEAVRKRPGMYIGSTSGEGLHHLVWEIVDNSIDEALAGFAKSIQVIIEPDDSITVIDDGRGIPVGIQAKTGRPAVETVFTVLHAGGKFGGGGYKVSGGLHGVGSSVVNALSTSLDVRVYKDGKVYYQEYRRGAVVDDLKVIEETDRHGTTVHFIPDPEIFTETTVYDFDKLATRVRELAFLNRGLHISIEDRREGQEDKKEYHYEGGIKSYVEHLNANKDVIFPEPIFIEGEQQDITVEVSMQYTDGYHSNILSFANNIHTYEGGTHESGFKTSLTRVINDYARKQKLMKENDEKLTGEDVREGLTAVVSIKHPDPQFEGQTKTKLGNSEVRTVTDRLFSEYFTKFLMENPTVGKQIVEKGMLASKARLAAKRAREVTRRKGALEISNLPGKLADCSSKDPEKCELFIVEGDSAGGSAKQGRSREFQAILPIRGKILNVEKASMDKILANEEIRSLFTAMGTGFGEDFDVSKARYHKLVIMTDADVDGAHIRTLLLTLFYRFMRPIVEAGYVYIAQPPLYGVKQGKNITYVQPGKHAEEELAKVLEELPASPKPSVQRYKGLGEMDDHQLWETTMDPEKRLMARVSVDDAIEADQIFEMLMGDRVEPRRAFIEENAHYVKNLDI

SEQ ID NO: 5037 - protein, 382 aa, Enterococcus faecalis
KTETSPTMRLNELTLQHYRNYETVSLDFPKTLNLFLGENAQGKTNLLESIYVLAMTRSHRTSNEKELIGWEQAAAKISGVVEKKTGTVPLEILISNKGRKTKVNHIEQKRLSAYIGQLNVILFAPEDLSLVKGSPQVRRKFIDMELGQVSPIYLYDLVQYQSVLKQRNQYLKQLAEKKQTDTVYLDILTEQLAEFGGKVLYARLGFLKKLEHWANLLHQKISHGRETLTIDYASSIPIDNTDLSLEALQNQLLQQLMNNRKRELFKANTFLGPHRDDLLFIVNGQNVQTYGSQGQQRTTALSIKLAEIDLMHSETGEYPVLLLDDVMSELDNERQIHLLETIEGKVQTFLTTTSLDHIKDKLTVEPDIFYVQQGKIERNSAT

SEQ ID NO: 5038 - protein, 87 aa, Enterococcus faecalis
KKEGCTLKKTFVLATEYITLGQFLKEINVIGSGGQAKWYLADNSVFVDGELENRRGRKLYAGMMIEIPEEGTFFMVKNGNESDDAAE

SEQ ID NO: 5039 - protein, 181 aa, Enterococcus faecalis
DFNIVIPGKSLTELSRSLTNEEEMVEISIMENQVLFKTETMYFYSRLLEGNYPDTNRLIPTSHNTQIEFYVPELLSAIERASLLSHEGRNNIVRLSISPDSVVLYGNSPEIGKVEEALNYENVSGEALDISFNPDYMKDALRAFGDMNITVKFLSPIRPFTLEPTETELDFIQLITPVRTN

SEQ ID NO: 5040 - protein, 141 aa, Enterococcus faecalis
ERKAPSVTMWSHGSIVVTSRFFWGIIRRLPEDMFTMEVLDNNLVGGGFPRGGGKIFVGGGGEKREIPPPPPPCGWAPPPRELPGSFFGEKNIFGTRGGGFMPESRPILTGVHFILENQKLLAVATDSHRLSQRVIPTEQAV

SEQ ID NO: 5041 - protein, 378 aa, Enterococcus faecalis
ISNLLMHLGLGFYLPVMPFIITVISFAVLFLVISFFIQFRLPKATLQELLKAGEMGKGEIKSSKVKSFLAVLLLIVGYGIALVAKGQLVLMVMFPVIFLVILGTKFLFDQLSVSVIERLKRKPKIFWKKTNMVVLSDLAFRMKDNARSFFLVSVISTVAFAAIGTLYGVNEMIFKGISSVPYELTLSDSTNPENQEMKQFATKTFQEKNIQFDQIDYTMYKTSAGIQLIKTSEYNKLAKFIDEPTLTGEKVVNLSQKDAPSAASVDVKSVQLANDQVLNIDKTEETNVLPTFGGVVVIPDSTSTDGIKAETETIWQPKAGTNREELIKAENIIGDKYPMLVGTAAMSAAITQYYTPFFLSDCSWLFVFLLTAPLHTEY

SEQ ID NO: 5042 - protein, 145 aa, Enterococcus faecalis
LSAFGLALYIIERKRKLESTGIQRLFYLSWTVIKLNLLFVLFSLAGGIIFGVGPALQMMTDFILEEGMNYQAITVKRAFESWKAHFKRSNCYFLLFLFTLGFVFYNIYLPVQFTGIMWLIITFILFFVSLILVLFYIYMLLVHHG

SEQ ID NO: 5043 - protein, 489 aa, Enterococcus faecalis
GMKKWQKGLAVAGAAALAVGLSACGKSSKDAASKGDDTTPTLLMYRVGDKPDNYDQLIDNANKIIEKKIGAKLKMEFVGWGDWDQKMSTIVASGESYDISLAQNYATNAQKGAYADLTDLAPKYAKEAYDQLPDNYIKGNTINGKLYAFPILGNSYGQQVLTFNKEYVDKYNLDISKVDGSYESATEVLKEFHKKEPNIAAFAIGQTFFATGNYDFPIGNQYPFAVKTTDTGSPKIINQYADKDMINNLKVLHQWYKDGLIPTDAATSTTPYDLNTNTWFMRQETQGPMDYGDTILTQAAGKPLVSRPLTEPLKTTAQAQMANYVVANTSKNKEKSVELLGLLNSNPELLNGLVYGEEGKQYEKVGDDRVKLLKDYTPTTHLSAWNTGNNLIIWPEESVTEEMVKERDKSIEEAKDSPILGFTFVNDKVKTEITNVATLMNRYAASLNTGTVDPEETLPKLMDDLNTAGWDKVQIEMQTQLDEYIQSQK

SEQ ID NO: 5044 - protein, 223 aa, Enterococcus faecalis
GVTVFITVTRTIVNATMTSLYAYVISRSNFPFKKFFTLFALITMLFSPGMVANYLVMTNLLQLKDTIWALILPLALGPFNILVMRTFFKKTVPDSIIESARIDGASEMRIFVSIVLPLAVPGIATISLFAALGYWNDWFNALLYIQKDTLVPLQYLLMKIQNNLEFLSRSTDMGAAAQEGLGVLPSESARMAIVVLSTLPIALTYPFFQKYFVGGLTIGGVKE

SEQ ID NO: 5045 - protein, 79 aa, Enterococcus faecalis
PKAANKLIVAIPGTASGNTMLTKMRISLAPSIRADSIILSGTVFLKNVRITKILNGPKAKGKINAQIVSFNCNKFVITK

SEQ ID NO: 5046 - protein, 127 aa, Enterococcus faecalis
TRFSTILGGRIMKKKKVTSVNVRSFNPTANLIFNIVIAIFAISCVVPFFFVIMISLTSEGSLSANGYRFWPKEFSLEAYRYIFQGAMSQRIIHALGGNSLHYRDKDDSQCNNDVIICLCHFSFQLSI

SEQ ID NO: 5047 - protein, 345 aa, Enterococcus faecalis
NDTKSIICFSNPIICSLKRYYENAIIFMKGAKRMKKKNGFFQNVWRYKALILMALPGFIWFIFFFYIPVLANVVAFKDFHISPDGFLASLRESPWVGFENFKFLFASKDAWLITRNTILYNVVFLAFNLFFAIAFAIIMSELRNRRLVKVYHTMSLLPYFLSWMVINYFVYAFLSPDKGILNQWITGNGGTMINWYADPRWWPVIFVFLNVWKSLGYNSIIYYASVMGIDPTYYEAAMVDGANKWQQIKNVTIPQILPMMSVLLILNIGGIFRADFGLFYIVPRNSGALYNVTSVLDTYIYNGLTATGDVGMTAAAALYQSVVGACLLLIANLVVRRIEPDSALF

SEQ ID NO: 5048 - protein, 60 aa, Enterococcus faecalis
KFTEMTVLCENVYLIFFLQLFKNLKNNWLNLTHKAILLACICFIKSENLIVSQRISSNYF

SEQ ID NO: 5049 - protein, 64 aa, Enterococcus faecalis
LFHYYFSICLYAHTICWISCYKSKRVDDIGHFDLCRQLLNFQLISRSKTIDFVYSSFSLFLFIT

SEQ ID NO: 5050 - protein, 370 aa, Enterococcus faecalis
  MISC_FEATURE (70)..(70): Amino acid 70 is Xaa wherein Xaa = any amino acid.
RRSNAGETILNTAQVDDTVNPPEETEVPVVPEAKEGKLTATKTVNNAKPKLGEAIEYTISFRNTIENGVXNKVVITDQLPKGLTYVKDSLTSVGDEPKPTSLTEANGTITAEYPSITDMKERSIRFKVIVNEEAKAGETILNKAKVDDTVNPPEEPEVPVVPEAKEGKLAATKTVNNAKPKLGETIEYTISFRNTIENGVLNKVVITDQLPKGLTYVKDSLTSVGDEPKPTSLKEANGTITAEYPSITDTKERSIRFKVIVNDEAKAGETILNKAKVGDGINPPEEPEVPITPEEPAKNKKETNKVVTDQNKPTKNSKNEIAINKKETSKSSYLPKTGEKVQKIFAYLGVGLILIVLILYVIKRNKEKEE

SEQ ID NO: 5051 - protein, 99 aa, Enterococcus faecalis
RQTKIRGRNRVHNQLPQHHRKRRPKQSSYHRPTTKRVTYVKDSLTSVGDEPKPTSLKEINGTITAEYPSITDTKERSIRFKVIVNEEAMRARQFSTQPK

SEQ ID NO: 5052 - protein, 869 aa, Enterococcus faecalis
  MISC_FEATURE (9)..(9): Amino acid 9 is Xaa wherein Xaa = any amino acid.
LPFTRGRGXIGDRNIQETALTQATESPEQPPLKAQPTGPLVPPTPGRGFNTPIYQSVHKGELFSTGNTNLKIANENTAAAQTFLNTRGASSGYAINNFPLEFADVDNDPNTYNSSRAYIDLNGAKEIAWAGLFWSASRYKGPAYGTNLSDEEISAPVQFTTPNGTVQRVSPQRYHRIDQDATNPGQRFGYNNTGFSNYADVTSILQGDKSATGSYTLADIPMTSSLNGQYQYYNFSGWSLFVVTKDQASKSRAFSIYYGARGNAAGTNNEFTMSNFLTAKQGNLDPIVTWFTVQGDKYWTGDNAQIKNSAGTWVNISNTLNPVNNAMNATVTDNDEHMVDKYPGKFAPDHPNFLDIDIDRMAIPEGVLNAGQNQINFRTTSSGDDYSTNAIGFAVNAETPEFEIKKEIVEPKETYKVGETITYRVSLKNTKADSEAINSVSKDALDGRLNYLPGSLKIISGPNSGEKTDASGDDQAEYDETNKQIIVRVGNGATATQGGSYKADTAETIYEFKARINERAKANELVPNSATVEAVDILTSAKVNETSNIVEAKIADEQVTGKLTATKTVNNAKPKLGEEIEYTISFRNTIENGILNKVVITDQLPKGLTYVKDSLTSVGDEPKPTSLKETNGTITAEYPSITDMKERSIRFKVIVNEEAKAGETILNKAKVDDTVNPPEEPEVPVVPETNAGKLAATKTVNNAKPKLGETIEYTISFRNTIENGVLNKVVITDQLPKGLTYVKDSLTSVGDEPKPTSLKEINGTITAEYPSITDTKERSIRFKVIVNEEAKAGETILNKAKVDDTVNPPEEPEVPVVPETNAGKLTATKTVNNAKPKLGEEIEYTISFRNTIENGVLNKVVITDQLPKG

SEQ ID NO: 5053 - protein, 252 aa, Enterococcus faecalis
DESLTVSQRDEGVFMLPEEFRQLLAAKGIELTDQQMTQFDQYFHLLVEWNEKMNLTAITEEKEVYLKHFYDSVSLAFFEDFASDKAICDVGAGAGFPSIPLKIVFPSLNVTIVDSLNKRITFLTELVNQLGLANVSLYHDRAETFGQKAEFRGAFDYVTARAVARLNVLSELCLPLVKKEGYFLALKASKSEEEINEAKPAIATLGGQFQKEVGFTLPITADERHIVVIQKKKETPKKYPRKPGLPNKQPIK

SEQ ID NO: 5054 - protein, 258 aa, Enterococcus faecalis
DGGTHMTRIISVANQKGGVGKTTTTVNLGACLANLGKKVLLIDIDAQGNATSGMGVPKPDVAHDVYDVLVNEEPITSVVQHTSRENLDIVPATIQLAGAEIELTSMMARESRLKLAIDEVRDMYDFVLIDCPPSLGHLTINAFTASDSILIPVQCEYYALEGLSQLLNTIRLVQKHFNPELKIEGVLLTMYDARTNLGAEVVEEVRKYFREKVYDTIIPRNVRLSEAPSHGLPIIDYDIRSKGAEVYQALAKEVLENE

SEQ ID NO: 5055 - protein, 302 aa, Enterococcus faecalis
QRKCWRMNKGKGLGRGIDALFQDIAKLEDVDVKNEQVTEILLNELRPNPYQPRKTFDETSLQELANSILHSGVFQPIIVRKSAVKGYEIIAGERRFRASKLAGKEKIPAIIREFDEESMMQVAVLENLQREDLNPLEEAEAYEMLMKNLKLTQAEVAERLGKSRPYIANYLRLLTLPDAVKAMVQKQSMSMGQARTLLGLKNKEQLLPLANRCIKDNLTVRQLEQLVAELNETQGKKGKKAKKAIKEKPIYIRESEDRLMDKFGTTVAIQEKEGKGKIEIEYLSSSDLARILDILDIHFDEE

SEQ ID NO: 5056 - protein, 76 aa, Enterococcus faecalis
SWYFYISKRRKKAWNMYDLGDIVEMKKPHACQANRWQIIRMGADIKIKCTNCGHIVMMPRRDFTKKLKKVIEKKAD

SEQ ID NO: 5057 - protein, 379 aa, Enterococcus faecalis
TERKSGKQMALTAGIVGLPNVGKSTLFNAITKAGAEAANYPFATIDPNVGMVEVPDARLQRLTELVKPKKTVPTTFEFTDIAGIVKGASKGEGLGNQFLSHIRQVDAICHVVRCFDDENIMREQNRDADFVDPLADIDTINLELILADLDSINKRYTRVAKMAKAKDKEAVEELAVLDKIKPVLEEGLSARTIEFTPEEEKIVKSLFLLTTKPVLYVANVSEDEVADPDNNEYVQQVRNFATSENAEVIVVSARAEEEIAELDSEEDKAEFLEAMGIEQSGLDQLIRAAYDLLGLATYFTAGEQEVRAWTFRKGIKAPQAAGIIHSDFERGFIRAETVSYEDLDKYGNMQAAKEAGRVRLEGKDYVVQDGDVMLFRFNV

SEQ ID NO: 5058 - protein, 253 aa, Enterococcus faecalis
AHIFKAIQPFRKRFPLHEGEEDTTMEAEALRAIVAENRQLEQNLTKRNEQYIFDLKKSLKAANLSEEELALALHGILPELVAGQKTGKTARQLFGTVSERTEAILNKPAEVKEPAGWMIWLDNTLLLLGLLTIMLAAMSLFSKGTAQPLGLTTYILGAMAGGYVFYLMHKYVYRFDRQGGDKSKRPGWLKTTAILFGGMFLWIAVFAGSAMLPPVINPILDPMIALVIGALAFVARYFFKKKYNIQGSFMTRQ

SEQ ID NO: 5059 - protein, 284 aa, Enterococcus faecalis
IRNNWIDQDGHIYFIFTRNELMDILGCKENKIAKIKKELKDKNLLYEKRIPPKKLPTGEFKNYPNRLYLGKLEVSATDVYAISNASYTNEFPESGKNQPSDKHDKIGVSFESGKNQRPEESNNTSTLFESGKNQPNLYLTNSLDTIDTIDTEKERLQQQLLLDQFSEVQEHTFLSKNSLEFVAAFSDTIQEAHEMVGTIIRAKTKVEKEYNIVLIGEDYQEEIDKCLRRVMHKIETDSTVKSPKGLFYKSFYNLFVECALEKENINKGNNSKGSEITLHNWVEK

SEQ ID NO: 5060 - protein, 62 aa, Enterococcus faecalis
LLYLQFYQINFPGDTTYRVKFIQTNESVTYFSTQLCKVISEPFELFPLFIFSFSNAHSTNKL

SEQ ID NO: 5061 - protein, 557 aa, Enterococcus faecalis
LVSKFKLRRLIKMKKYKKFCFLGIGLLPLVLASCGTNTATKDSQDATEKKVEQVATLTAGTPVQSLDPATAVDQTSITLLANVMEGLYRLDEKNQPQPAIAAGQPKVSNNGKTYTIVIRDGAKWSDGTQIIASDFVTAWQRVVDPKTASPNVELFSAIKNAKEIASGKQAKDTLAVKSIGEKTLEIELVEPTPYFTDLLSLTAYYPVQQKAIKEYGKDYGTSKKAIVTNGAFNLTNLEGVGTSDKWTISKNKEYWDQKDVSMDKINFQVVKEINTGINLYNDGQLDDAPLAGEYAKQYKKDKEYSTTLMANTMFLEMNQTGENKLLQNKNARKAISYAIDRESLVEKLLDNGSVASVGVVPKEMAFNPVNKKDFANEKLVEFNKKQAEEYWDKAKKEIDLSQNTSLDLLVSDGEFEQKAGEFLQGQLQDSLEGLKVTVTPIPANVFMERLTKKDFTLSLSGWQADYADPISFLANFETNSPMNHGGYSNKNFDELLKDSSSKRWQELKKAEKLLINDMGVVPIFQVGTAKLEKSKIKNVLMHSIGAKYDYKKMRIEK

SEQ ID NO: 5062 - protein, 390 aa, Enterococcus faecalis
RSNGGYMELIRRVFIKDKEIILVGTAHISSESAELVKNIIEEENPDVVCLEWDQSRYDKYLNPDEWSDTDIVQVIKQKRLTVLISSVIYKLIQKHLAKINDSVAGAEFFEAVSSAKKVGAKIALVDRDSQVTFKRFWRLIPLRKKALLPYAFGSVLEGAEESEEEMLKLLNSENFEPIFEQLQEAYPELWKVLLVERDQYLAQKISDQEAGKIVVVIGQAHLRGVEKNLKSNQQINIKELETLPPKLWSTKVLESIIPLIIIGLLIYSFFLGVDVGKDQIMRWGIWNGGLSALFTLLALAHPLTIVTSLVFAPLATLLPMVSVGVFSAIVEATLRKPKVRDFQTMDEDIKSLKKIYKNRVLRVFLVFVLASLGGMIGNFVGGLEMFRHLI

SEQ ID NO: 5063 - protein, 295 aa, Enterococcus faecalis
ITGIMSKSVYIKVEADSRPISVEELSKFSERLGVNFFEILNRAGMNTKSVNETGKEKLLISKIFTNPDLFDKNFQRIEPKRLTSLQYFSIYLGYISIAHHYNIEVPTFNKTITSDLKHLYDKRTTFFGIDYEIVSNLLNVLPYEEVSSFIKPMYPIVDSFGKDYDLTIQTVLKNALTISIMNRNLKEAQYYINQFEHLKTIKNISINGYYDLEINYLKQIYQFLTDKNIDSYLNAVNIINIFKIIGKEDIHRSLVEELTKISAKEKFTPPKEVTMYYENYVAIENNPIPEIKEQS

SEQ ID NO: 5064 - protein, 286 aa, Enterococcus faecalis
QKMTIEKLEYFYTIAKYNSISKAASELHVSKSTLSASLKDLESELGHLLFNRNGNSLTLNSYGDKIVQSVYIILNEAKKMKLNLHEMIENPVMRLGFGNTSLMYKVTENEDQLNRFWECYHGSSFELLNKLENHELDFVITSADVNSPVLKKEQLIELKMYLCVSREIKQEIEEEGFSCLTNYPFLFLPHHLDHLEATKSVLEMLQLTSPLVCCYDTLMLTRLIEKSKGVYAVISLRKEQLQEIDSKLFFLPIERKQKFYLYRNVSSSVFVQPGQIKATLQKLLET

SEQ ID NO: 5065 - protein, 469 aa, Enterococcus faecalis
LLERTVFMIDRKKVILYTCCMSLFVVTMDVTVVNVALPSIQSDFHTNLSTLQWVTDGYTLMVASLLLLSGSTADRIGRKRVLQLGLACFGLASFLCGISQTPGQLIAFRMLQGIGGSMLNPVAMSIITQVFTEKLERAKAIGLWGSVTGISLGMGPIIGGLIVSYFSWRYVFFVNVPIIAAAIILTQKFVPESKVEKTVKNDFVGQALMILFLFSSIYSIIGLPRKGLFAPDILSTGIIGCLAIVIFFIYEYNIDNPLINPRFFLSIPFTSASFLAIFGFIIYNGYLFLNTLYLQEMRGFSPLEAGLSTIPLAFVSFLVAPRAGEMVGRIGTKRPIMLCGISMLAVSFLQLFVTKTTPMIILFIIYIFLGIGFGMLNSPITITAIEGMPLSQSGTAAAIAVTCKQIGNSLGVALPSLLITKPITSSLTRTPFTNVWLLFGCCAIAIIFLSYLSNSPLAKKSLRRVRFYF

SEQ ID NO: 5066 - protein, 686 aa, Enterococcus faecalis
MKKINNRLGLFLFFVLLFWAKTILAYYLDFSLGVKGSLQREILWFNPVATTLLLFGFSLYFKKHKTFMLSLTLLNVLNTLILYLNIIFYREFTDFITIQSVFGFSKVSEGISGDLLALMRVHDVFYWLDTLVLLVLVFYSFKQRRNHQVFVTKPINRRLAISISCLSVLLFSVNLFLSETDRPQLLQRIFDRNYIVKYLGLDAFTAIDGVKTAMSNEVRAEASSNELPEIMKFTKQNNLPLNPQYAGIAKGKNVFVIHLESFQQFLINMKVQGQEVTPFLNQLYQNKATISFDNFFHEVGQGKTSDAENMLETGTFGLPQGSLFTQLGSDNTFEAAPAVLGQKGYTTAVFHGNVGSFWNRDHVYKNLGYQYFFDRSYFSKDDKMLGYGILDKQLLRESASELEHLQQPFYAKFLTVTNHTPYYTDDQNFPFPKLNTGNSIVDDYVRTAHYLDQSLEQFFHYLQTTSLYNHSIFVIYGDHFGISDANNKDLCKAFNRDPKTWTNYDNAQLQRVPLMFYMPGYTQGKIMHEYGGEIDVLPTLYHLLGVDDKNYIHFGTDLLSPQYKQVVPFRNGDFVTPQFSYLGGEIYNNQGKKLDQVPADLKAEVTKDNDWVKKSLSLSDKLNRENLLRFYKPQGFQEVQPKDYNYDVAFEKNKVLEVEKQKNAQSTSLFSQNGNQTTVQNYPTTP

SEQ ID NO: 5067 - protein, 211 aa, Enterococcus faecalis
  MISC_FEATURE (1)..(7): Amino acids 1, 6 & 7 are Xaa wherein Xaa = any amino acid.
XQVVFXXDLDYQETATVEIIGFMIQSGESEKTWTTFFEYLKERGLQGTELVISDAHKGLVSAIRKSFTNVSWQRCQVHFLRNIFTTIPKKNSKSFREAVKGIFKFTDINLAREAKNRLIHDYIDQPKYSKACASLDDGFEDAFQYTVQGNSHNRLKSTNLIERLNQEVRRREKIIRIFPNQTSANRLIGAVLMDLHDEWIYSSRKYINFDK

SEQ ID NO: 5068 - protein, 334 aa, Enterococcus faecalis
ALPVLRHLTIIGGGPVGLFAAFYAGIRKAKTKIIDSLPQLGGQLTMLYPEKYIYDIPGFPAIKAGELIANLEKQMQPFQHDVCLEEEVTHLAQEADGLLRLDTTKGTHYSKTVIFAIGNGAFQPRRLAIENVEAFEGESIHYYVTDMKKFAGKKVAIAGGGDSAIDWALMLENVAEEVSIIHRRPQFRGHEHSVEQLEKSSVSIRTPYIISDILKENETFTGIQLTETKGDQTLDLPLDDLIINYGFTSSLTHLKEWGLDVSRNAINVHSDMSTNIPGVYAVGDICSYEGKVKLIATGFGEAPTAVNNALHYLRPDARRQPVHSTSLFENGVPK

SEQ ID NO: 5069 - protein, 327 aa, Enterococcus faecalis
  MISC_FEATURE (94)..(94): Amino acid 94 is Xaa wherein Xaa = any amino acid.
KVLGGRKMNQPIIYLNEVFNEEQLEQVKAVAPNYLVKTSTDHLSSAEEEAIEIMLGWHKEIGPRLLASDTSHLKWIQLISAGADYMDFDKLREXRILLSNGSGIHSVSISQHVLGVLLAHTRGLQESIQQQMQHTWNQTAPSYQQLSGQKMLIVGTGQIGQQLAKFAKGLNLQVYGVNTSGHVTEGFIECYSQKNMSKIIHEMSIVVNILPLTETTKHLYNQALFEKMAPETIFVNVGRGASVATNDLITALNNKTIAFAALDVFEEEPLPEDSPLWEMQNVLLTPHISGMTPKFKSKLLAIFIPNLNQFVTDQTLVKNQVSLKKGY

SEQ ID NO: 5070 - protein, 530 aa, Enterococcus faecalis
PSCSFGRKKERNKMQIKILATSDMHGYIMPTSYSEKKMDLPFGTAKAATMLKKLRASAKGPVFQIENGDFIQSSPLSYYVRKAETHSVAAITKIINQMNYDVSILGNHEFNYGLDYLKETIASYQQPVLAANILGKDGQPYFGQPYVIIEKQGVKVAILGVTTQYIPHWEQPATVKDLTFKSVVETAAEYVPKLREEADLVVVAYHGGFEKDLETGEPTELLTGENEGYDLLEKVPGIDALVTGHQHREIATKLNGIPVIQPGFRGAFVGEITLEIEPMAKGYHVIGSDAAIHPVGNEQPDTEVLALTTALHDEVEEWLDQPVGNVEGDMTIQNPNAVRLKEHPYIEFINNVQMASSGTDISGTALFNNEGKGFNNQITMRDIITNYIYPNTLAVLRVTGQDLREALEQSATYFVLEKGQPIFNPKYVDPKPQYYNYDMYEGIEYTLDLRQPFGERVTKLNYHGKAVQAEDVLEIVTNQYRAVGGGNYQMFQPEKIIREIQIDMTELIAEYLKKHPIIQASTNDNFKVIW

SEQ ID NO: 5071 - protein, 447 aa, Enterococcus faecalis
KNIARTWRANCFINFFKGEKKMKFKTLATTVLATAAIFALGACGNGNGAKESNDIVKEVKEDTTITFWHAMNGVQEEALTKLTKDFMKENPKIKVELQNQSAYPDLQAKINSTLTSPKDLPTITQAYPGWLWNAAQDEMLVDLKPYMDDDTIGWKDAEPIREVLLDGAKIDGKQYGIPFNKSTEMLFYNADLLKEYGVEVPKTLEELKEASKTIYEKSNKEVVGAGFDSLNNYYAIGMKNKGVDFNKDLDLTSKDSQEVVDYYRDGIEAGYFRTAGSDKYLSGPFANKKVAMFVGSIAGAGFVQKDAEAGGYEYGVAPRPEKINLQQGTDIYMFDSATPEQRTAAFEFMKFLATPDSQLYWAQQTGYMPILESVLHSDEYKNSKTTKVPAQLENAVKDLFAIPVEENADSAYNEMRTIMESIFASSNKDTRKLLKDATSQFEQAWNQ

SEQ ID NO: 5072 - protein, 703 aa, Enterococcus faecalis
RKWGNKPMKKVLTIIAFVFLGILAVITLFPFVYMILAGLMSYSEATSMPPTMFPKQPQWQNYTEVFQKAPFLRYFLNTVFVSGVTTIATVVTAVLASFALTSLKFRFKNVVIALMISLLMVPYESIIFTNYQTIAQLGLLNTYSALIIPFLTSIFYIYYLNGYLKGIPDTFYKAAKIDGASDLEYIWRILVPMSKPALVTVGILTFISSWNSFLWPLLVTNEKKYRLLNNGLSAFATESGSDVHLQMAAATLTVIPILIIYLIFRKEIIRGVAKMESKAKTTVTFHSGILTIGGTVIEVAYKDAHIFFDFGTEFRPELDLPDDHIETLINNRLVPELKDLYDPRLGYEYHGAEDKDYQHTAVFLSHAHLDHSRMINYLDPAVPLYTLKETKMILNSLNRKGDFLIPSPFEEKNFTREMIGLNKNDVIKVGEISVEIVPVDHDAYGASALLIRTPDHFITYTGDLRLHGHNREETLAFCEKAKHTELLMMEGVSISFPEREPDPAQIAVVSEEDLVQHLVRLELENPNRQITFNGYPANVERFAKIIEKSPRTVVLEANMAALLLEVFGIEVRYYYAESGKIPELNPALEIPYDTLLKDKTDYLWQVVNQFDNLQEGSLYIHSDAQPLGDFDPQYRVFLDLLAKKDITFVRLACSGHAIPEDLDKIIALIEPQVLVPIHTLKPEKLENPYGERILPERGEQIVL

SEQ ID NO: 5073 - protein, 155 aa, Enterococcus faecalis
LCFSRIPSVNWLHNVQMSMPTLIIFGVWTSLAFNIIILLAGLRNIDEEHFKIAKMFGASDGEIFRRITFPQLVPTIAFLLTVNLIGAFKVYTQVYALFGGRAGIANSATTAVYYIYDKFHIAGRPGIAMAATVILFVIILVVTFLQNKLLKKVGQ

SEQ ID NO: 5074 - protein, 150 aa, Enterococcus faecalis
MEQQEKNEWAQQEQEIQEGLKGKSFWYADWGFPILVGIMSAAIFAGTHMYVVYGVGAFNEVSIVAMLKAGLDGGSYGAAAAFGASFLFARILEGSLVGILDLGGSILTGIGIGVPAIFLSMGIKAPVENFGLALLTGALLGLAVDGPHHR

SEQ ID NO: 5075 - protein, 264 aa, Enterococcus faecalis
REEEGMEFVIILLKSLLIGGLLGFAAGAGAARMFHAPQTQGLGAFRTLGEMNAAQGDPASHFSFGLGFFFNAWASAVGAGAFTQDVTHRIVPNWAAAILLVKDKDVTKTMHNPKKMGIVGVFVGMATVAFLNSTAAAIPESLQVTAVAVLVPAATILINTVMPVLFWLAALDAGKRTGFWGTLFGGLSQLVMGNAVPGVVLGILIGKGVDDLGWTRMTLGMLGVIILLFILSGFFRGFDLEMIESFRLSIPQWLNNLHNVFTVK

SEQ ID NO: 5076 - protein, 123 aa, Enterococcus faecalis
KGAVIMDATKRSTQTVIVSGKGNKKNEAFASALNDVSKKVLKETTEVLIRIEPKEVTIRQAKEQVYTEKFLFFFFPRKRVIYHVELAVEVEIQAIAVEEVDFLTETIKEPNAVVVPFLSKRGV

SEQ ID NO: 5077 - protein, 127 aa, Enterococcus faecalis
TKQLIGGKVMITVVIADRLGKGQNVAKGVEQAGGRAVVVPGMGADMRLGDVMQQEKADLGISFCGSGGAGALTAATKYGYPERHGMRSIEEGVTAINDGKTVLGFGFMDQEELGKRVTEAFIKKHGA

SEQ ID NO: 5078 - protein, 118 aa, Enterococcus faecalis
NNQRRKRMELAMEAQEIIRQSAEPEKLQSIIKQTSARLAEAQIEPTELQWTILINHLNEMLNRSREGTTLAGVDRTLFTELTPETLKIAEETTEAIGQLSEDEWYVLAVHFEVAKQNN

SEQ ID NO: 5079 - protein, 641 aa, Enterococcus faecalis
QGMTVLLSKRAINILLMLLDLEGSITTQELAESFTVSVRTIKYDLEDIRAWFEQHDETLYSKRNKGIWLDLPDSKRLLLKNEIIDVDRFETYPDQKRRVNVLIFQLLSVKGYLTAQQLADELLVSRNTIVSDLEQVERLLQAYDLTLIRQARQGFTISGEESNVRLLMEFITQKELTEYDIYQIMNYVTKTKGAEKIPKIKFGSGTLFQGCYRSALKKMRNLINPLDQNQFDYAEILSITLRVAIAAARMQMAHTIGTYRVLSQKTRFEQRNEVPLLLLQEVFERYDLPLLADEYFYIYSDLFGTHQRQDMVQLTKQVIESVSKELNYPFVNDRQLFTNLFAHLSLRFTKKHLFINEYNPFSEEIKGKHPALFLAIQSACKQLIQRSVLLVNDSFCAYIALHFLAAQERQQQEAKVVRIVYVCSTGLGVTSLIEQKILEEVPNVELAGFASVLNATEVIQAEKPDLVLSIFPIEEMTYPFIKVSPLLTDTDLSLIREEVDKILLGKRQGKGTARSTKSDVIEKNERIQSQDLLVKAYIIYEELKRMFQTKLLSEYQEAFLLHVLLMTHRITFNKQYEEIPCNREVSHERQEEIRQIECLFAKNELPVNHAEISALLNYLEQPKEEEDGTSNGSTGDHSTKC

SEQ ID NO: 5080 - protein, 83 aa, Enterococcus faecalis
RIITITCYPNYSVLKCVLCDELTQSDSFGYSVLTASDCQTQRHQIVRLSVTGFVTCRTEYFCGEGFCLFMQINSVVSLNSYYC

SEQ ID NO: 5081 - protein, 351 aa, Enterococcus faecalis
RNRFGETVSFFVEMVSKYSFFSYSERGGDHMDKIRYGIMSTAQIVPRFVAGLRESAQAEVRGIASRRLENAQKMAKELAIPVAYGSYEELCKDETIDIIYIPTYNQGHYSAAKLALSQGKPVLLEKPFTLNAAEAEELFAIAQEQGVFLMEAQKSVFLPITQKVKATIQEGGLGEILWVQSVTAYPNVDHIPWFYSREAGGGALHGSGSYPLQYLQYVLGKEIQEVTGTATYQQGATDSQCNLALKFAEGTLGNIFINVGLKIPIEMTICGTKGQIVIPNFWKTDCAYYTDAQGNTVKWSEQFTSEFTYEINHVNQCLQDKKLTSPVMTKELTIATVKIVESFYQEWFDNE

SEQ ID NO: 5082 - protein, 113 aa, Enterococcus faecalis
MIKRGEVFYANLSPVVGSEQGGIRPVLIIQNNKGNLFSPTLIVAPITRNVSKRLQPTQVLIEIPHNECRTPSLILLEQIRTLDKERMLHKVCQLSREEMEQVNQALKVSVGIR

SEQ ID NO: 5083 - protein, 208 aa, Enterococcus faecalis
GDRQPIIIGVTGGSGSGKTSVSRAIFNNFPDHSIMMLEQDSYYKDQSHLSFEERLNTNYDHPFAFDTDLLIQHVEQLLNYQAIEKPVYDYVAHTRSTETVIQEPKEVIILEGILILEDRRLRDLMDIKVYVDTDDDIRIIRRIKRDMEERGRTLDSVIEQYLTVVKPMYHQFIEPTKRYADIIVPEGGENHVAIDLINTKVDSILTKM

SEQ ID NO: 5084 - protein, 234 aa, Enterococcus faecalis
GIGSALGLVWAFLTPLVTVLTYWFVFSVGLRSRAGDNMPFIVYLVTGMVPWFFFSDSLLSATNVFREYSYLVKKVVFNVQILPTSKILSNLYTHLFFILIGFVITTANGYYPSLYSLQLIYYLACLLVFLTAITWITASTQPFLPDIMQFINIIMQTVMWTLPILWQPTGMIATILKINPLYYIVQGYRESYLGGAWFWEHWQYSLYFWGVTIVLLLIGSTVFRRLKPHFSDVL

SEQ ID NO: 5085 - protein, 409 aa, Enterococcus faecalis
GENDMSEYAIDIQHITKTYNMYKKPSDRFKEALSPTKKSYHDLFYALDDVTMQIKKGEMIGFVGENGSGKSTMLKIITGVLTPTSGSMVINGKISALLELGSGFNPEYSGYENIFLNGMVLGFSREEMEERVQDVIDFADIGDHLYQPVKTYSSGMFVRLAFAVAINVDPDILIVDEALAVGDLEFQLKCMEKFTEIKNSGKTILFVSHDVNSIRRFCDRTFWLQHGKVVEYGDTMDVTTNYENFLKKKSIKTVDREATMKDETPTPDIIEVDHAELLNADYEPLEMVTQDEKVIVKIEYTVKNDQIKKPVCGVAIRTVDNHYVCGLNTLLDGVQIPWKKGRNVFYLEYEKMSLLTGEYYFDIAFFEEHATVPLVYKTKYVTMFITGRYAGEGIVILDHKWKDTTKDEV

SEQ ID NO: 5086 - protein, 1056 aa, Enterococcus faecalis
IINGRIRQKMKYDFEMETDESTSVGKIVAQIKENSDVLEFGPGNGRMTSYLMEEKKCQVSIVELDKELYDHVSQFSTDAFYGNIDENDWVEYFAGKTFDYIVFADVLEHLMNPQSALAKVKPFLKPGGQILITFPNLAHNSVLIDLFNNRLTWNETGLLDATHKSFYLQEGFEKVFAEVGLYIAKEDFTFNQVGYNEIPTTYEALPVEVQAAFKARPFGEVYQYFFALTAEPVEQPERVTPVNSYNEKNVHILINCGEEKETELDQPVDLQKPETKQFQLKIPEDVQLIKLFPSLTGAIVKLSMTIDGETVPVAATNAFLVQENIYYFLDTQVPVIEVTDAQMAGKDLTVDIDYFFEGNYSERENTFIHALLDERNQFLEEMNKQTETAPMPTGKYKRITLTKFDKMINLTIDDIARDVENNVSVIRGWAYDKQTNYPLRFSIAEASESVTYTVETEYRRDVIDMFELEGDQDYGFVITIKDPEDLPAYTLNIDTKSGQKVQYVVERPNMVQPGTKFDRAWRSIQTRGLMGSVKWYFKRQEKAEAPVDVEAVLAEIKTFQFQPKISVAVPVYNVEEKWLAACVSSLQNQYYENWELCLADDASPSEHIKPMLEKYKELDQRIKVIYREENGHISEATNSALSIATGDFIGFMDNDDELAPQALYEVVKALNTDPTIDFLYTDEDKITENGRRFNAFYKSDWNPELILNHNYITHFVVVKRDLLEKVGGLNSAYNGAQDYDFVLRATEQATKIKHIPGMMYHWRAIESSTALNPESKGYAYVAGQKAVQAATERRGLKAQVEIAEFYGSYKINYLYDHVPMVSLIITNDTENMSSYLRQLLEKTAYTNYEILLPARFENQINIQNDRLRYVSTETRHGMIQAAKGEYVALLNAGLVPTKNDWLKELMNIGQQETSGLVTGRVVDARYRVETVGVSVDTDKGRLLYPEKGTPGKSLGYYYRIALPRNIQAATEDCLLFNKQLYLNLEGINESLGKEWMGVDLSLQFASAGKRNVYVSYAILKADEKMQNHDKKGSYKELAEKWAAEALVDPYRNPKHL

SEQ ID NO: 5087 - protein, 534 aa, Enterococcus faecalis
SLPKSETSIRRMHMNEDIKVIFDSIYRDKTTNNLTITGWALDTITKESPTFTINNENQVSAYNIQRVLREDVNQIYQTEPAIEAGFVVTLEGIKQKKVLPFHFQSSAHVITVDFPLNKKYPVIPGTEDKVTRLWIKAKKGFKYMAKNGISHTIQRAKIEKLRNQASYPNWLARNEVLDIEAMTQEIATFHYQPKISIAMPVYNVEEKWLRLCIDSILNQVYTNWELCMADDASTDPNVKKILTEYQQLDERIRVVFREQNGHISEATNSALAIATGEFVALLDNDDELAINAFYEVVKVLNENPELDLIYSDEDKIDMDGNRSDPAFKPDWSPDLLLGTNYISHLGVYRRSILEEIGGFRKGYEGSQDYDLVLRFTEKTTKERIKHIPKVLYYWRMLPTSTAVDQGSKGYAFEAGLRAVQDALVRRGINGHATHGAANGLYDVYYDIESEKLVSIIIPTKNGYKDVQRCVSSIIEKTTYQNYEIIMADNGSTDPKMHELYAEFEQQLPGRFFVESIDIPFNFSTINNRAAKKAH

SEQ ID NO: 5088 - protein, 72 aa, Enterococcus faecalis
YLKAKHDIPSVNGFDIDPIQLAFDLTMLKLYKSDFEIPEHSDELYELYISQLTPIREEINDRTRFDLFNSNS

SEQ ID NO: 5089 - protein, 186 aa, Enterococcus faecalis
MSMSVILRKSLIEVLNKKNEKKKDVAREISTSQQSLSDWTSQNNVKPVTIENALRLSDHFRDSTFTMEVIHQFFGMFKTCDGDVYRKDPSSLDRLQKIESNERKALKHDIERIILKNPEYLSEQDISKIVAYANEYLDEVIVEITLLSSLCDLASIDIRYLSEQRFPYWEQLGYMRKENTNGTRSY

SEQ ID NO: 5090 - protein, 81 aa, Enterococcus faecalis
GRRIQMALEVIDFKSKKDRKVNSKKIPPLKAIEVAKRKNVSAATVTRWMKREIDPLPAKRNGGLVRIEVDDLEEWYERNFI

SEQ ID NO: 5091 - protein, 64 aa, Enterococcus faecalis
KKLYIGGSLVKNKELAIKTMMTLSVGILFFVFILCLIKSQFLTAIILALFLMFIRVLWVNRSGK

SEQ ID NO: 5092 - protein, 71 aa, Enterococcus faecalis
MKKRKPKSLYEARILGSFILVFILGLVIKNSVPASYPLLIIGPIAVVWFMKYDDAKYLAYTKKETHSSTND

SEQ ID NO: 5093 - protein, 128 aa, Enterococcus faecalis
LTQKKRLTRPQTIKSHTKIIHENYNTKSGGNEMDNVSNKLTMSKRFEEWFKNATENCAERELYATALIARMDWLVDPIISKSYRYDLTTELNQNHSSAWYDVATEICNKRKETVIRAILEDNIEIEGD

SEQ ID NO: 5094 - protein, 715 aa, Enterococcus faecalis
KTISKLKEINCMKNISLESIRIHNFKGISDLMIEPNGKSIDIFGDNDAGKTTIYDAFLWCLFNKDSKERTKIQWRPLDENSEPIRGKQTSVTVVLNINGQAKEFEKVRGDKEVIKRNSEHKSYEMFTKYLVDGLETTTKKAFEDELEKVLDQDTFKNLTSVTYFFEQLVADERRQKLFEYFGSKTDEEIINESPSIHQLKEIIGNDDIKTARERVLQEQKRINETLKNIPVKIEGIQAALPDIENINKEQLLTTRNELTLKKNYIENQLVTIRNGGNISELIASLNTKQEELTAAKLKHDNAQNARINGIEQGKSKLFADLNKAQKTYADEESSLNVTERLVSIKDNELIALNKKHEELYDKYDEVEAEEFTGGLVYTKLSFNENLLICQHCNRPYDVKDQDEMKRHHEEEEQKRAEEIESTNKEIKAQFEADKQIKLSEIREKGIQNNKDRKALKKEIGELKEQLLIKTEAYNIAKKHLEDVKENLADVEQQISSLKLDKIPFEATEKYSTITKEIKKLQEYITQSNEAILEQTSAKTSEITEIDKDIAMIDEKLALLKEYERQLLIIEDFNEQERQLSHKKGEVLQKLVLFEGFFITKQNMLQEIINSHFSVVKWKLFDFFEDGGLNEAVCEPMIDGVPFSSLNNGSRMQAGLDVSNTLMKQEGYIVPIFIDNAEGLTNHNRDSVQVDTQVIAMYVNEDDKTLRIQNHKTEGK

SEQ ID NO: 5095 - protein, 199 aa, Enterococcus faecalis
  MISC_FEATURE (135)..(135): Amino acid 135 is Xaa wherein Xaa = any amino acid.
MTHELAENKIYGNRLTKINDTFMPQVESQLLSNGINMTEYQKQCVISAIQGINTMLTNSNLSINDVDSTNMTETLMTIAALQVNASAIPREVYFQTRNVNRKQFGQSDNWVKVIEMGIERDGNDAILSKFGRNVXHVHRHWESERRRPFFRNAGYKGIISDRSRMGGPTGKGKVVRVVYPIEMSDGTIELSHCRTRGCC

SEQ ID NO: 5096 - protein, 60 aa, Enterococcus faecalis
  MISC_FEATURE (21)..(21): Amino acid 21 is Xaa wherein Xaa = any amino acid.
LKWVLNEMETMLSFQNLDGTXNMFIVIGKVRGEDHFFVTQVIKGLSVTDPEWGGQLVKEK

SEQ ID NO: 5097 - protein, 218 aa, Enterococcus faecalis
LELFILLKCLTVQSSYHIAEREDVVKNLIAHINQNLMNETFGIAKKKKDASYQQKQEIDNKKQEIMNNLKTMSLDDILDSQEYQSYISPAWKSPQSRESMIVRKMRNNIVKKIPKNFENAYVAMQYQSQDDEVVKSVRKDVTEQTAQEVFDFDEEPSEATQETMKHNKETTAETTIIVPEELAKEPVTSHEKDNEPTQTAFFDDLTTTITSDTDGRGF

SEQ ID NO: 5098 - protein, 240 aa, Enterococcus faecalis
HRWTWLLMVEINIQGSSSAGNNYLLADGNSSLMLEAGLKPKDIMKQGINFSNIQGLLVTHEHGDHSKYINDILLAGRFDVWASRGTLEALGINRRSHILKANQQQKIGDWLVKPFATIHDDKKARAREPLGFLILSPSGKKIVFATDTNYLPKTFKDVTHWLVECNHDIKLVRQSKLPKSVQDRILRTHMSIDACKKFFQSTDLTKTEEIYLIHLSDKNSDPEKFKEEIEKITNKKIIIA

SEQ ID NO: 5099 - protein, 264 aa, Enterococcus faecalis
KNNYCIESGGVTLNYLQQILAFDDYLLYKQKLSSGQIALWRALMSINNKAGWATWFTAANATLESLSGLSRSGINKNRNALKQLGLIDFKSNGRKATSYKVCVLYTLNSAQESTQQSNDKVTLKSTTQSTNSGTLIKHKQNINTNNSFSPETDKNKLNIYAAVEQNFGRPLSPIEMEMIKQWQTEDGYPDDLIQLALKEAVLNQAFSLKYMDRILLSWERKGIKTKNQAIKKISEYNMRNDQEEISVDSIPKVTMHNWLNPEGN

SEQ ID NO: 5100 - protein, 144 aa, Enterococcus faecalis
ERGAVMKAWSQFEKMIDQTNEWYCRNRKGTVTKIPNGTKTIRVGGKPVLIPTNKTRCDFIGHLKGRPIAFDCKSTENKTAFPFYVGNKPMLKDHQKNFLKDFKLSGGTAFLLIQFNKSHQVFLVDVDDYLNMQKNLGRKRIKSV

SEQ ID NO: 5101 - protein, 94 aa, Enterococcus faecalis
RQKHTQEDFYMTQVHFTLKSEEIQSIIEYSVKDDVSKNILTTVFNQLMENQRTEYIQAKEYERTQYRQNQRNGYYEPRFSTLVCPLELKIPPNT

SEQ ID NO: 5102 - protein, 124 aa, Enterococcus faecalis
FQHTWWATMAKFPKPQLPRARHEIHTSLQEVVTVSADLLKTNGRLAMVHRPDRFLYILHAMENANIAPKKARFVYPKPGKEANVLLIEGIKQGKKDGFRVLPPLFTYNEKNEYEAEMKAMLYGE

SEQ ID NO: 5103 - protein, 92 aa, Enterococcus faecalis
RLCCMENKKSHYFYVLLCQDGSFYGGYTTEPERRLTEHNSGTGAKYTRLAKRRPVIMIHTEKFETRSEATKAEAAFKKLTRKQKEQYLKTFH

SEQ ID NO: 5104 - protein, 236 aa, Enterococcus faecalis
KRGITMKIGIIGAMDQEVKILKEKLTDTMSWERAGALFVSGSLGRHEVIVVRSGIGKVASAVTTTLLIHQYGVNMVINTGSAGGIGEGLKVGDLVIADKLAYFDVDVTGFGYAYGQLPGGVPLYFETSEYLRMEIAKAAEKTGLAIRKGLIVTGDTFVDSAEKIAKIKKEFPEALACEMEGAAIGQAASQFNIPFLVVRAMSDTADGEATQSFDEFIDEAGKKSAEMVIHFVENLV

SEQ ID NO: 5105 - protein, 102 aa, Enterococcus faecalis
GGHAMSKGPLVTRTELRKRREAEEKEAERRQQEEQKLAEKAYKRKEKEISTFYRKEKKKQKPINKSRVGEYSKRRERSTWLNKAIIIVAILLAVVAYIVLNL

SEQ ID NO: 5106 - protein, 96 aa, Enterococcus faecalis
KKKLGIVQVSLTYINSMYLSPGFANEKLALYLATDLQKVENPRPQDEDEILELYELTIAEAKAEVAKGTICDAKTLFAIQYWELYLLQRQFKEDTQ

SEQ ID NO: 5107 - protein, 153 aa, Enterococcus faecalis
IFFFEKGLTRRRRGAIFIILGYDKQERLVKDMLNYEDFEEKTLQRREIFKGKIIDVFLDDVALPTGGTAKRELVFHSGAVAMIPLTAEGKIVLVKQFRKPLEQVILEIPAGKIDPGEENQLETTAMRELEEETGYRAGQLNLHKFNVSVTRIC

SEQ ID NO: 5108 - protein, 226 aa, Enterococcus faecalis
MNKLNTKLLIGYILLGALIIAVAREYGFFAFVILVGFLVFVLYRKKKNAADKSDQMPYLTKDKEAHYRELGLSPQEIDFFRSTMSTAKKQIIQLQENMNRSTKLRAIDLRNDTTKVSKALFKELVKEPKKLHLANHFLYTHLPNIVDLTSKHLEIEQHEVKNKQTYEKLEESAQIIDQLSKLVKNDYEEIVSDDLDDLDVEMSIAKSSLSQKAATEESPQVNEDQQ

SEQ ID NO: 5109 - protein, 399 aa, Enterococcus faecalis
GGKTMTEQQPKETTSVTNTLDDLLSNPFSSMDELTPTQQNELSELKEQQAAPRLIDKLPQERQAQAKELASKIDVQDSQAVITYGSNAQIKLGEFSQAMLNHVQAQDIGPVGDSLTDLMFRLNEANPNELRAGEGNFIQKMLGKVKQSVYEITAKYQKIGAQIDKIAVKLTHEKDGLLKDNAMLDQLYQKNKDYFDALNIYIAAGELKAEELRTQIIPEAMKKAEESGDQMDVQIVNDYNQFLDRLEKRTHDLRLARQITIQQAPQIRLIQNTNQALAEKIQSSVNTAIPLWKNQVVIALTLLRQKDAVTAQRQVSETTNDLLKKNSEMLKISAIETAKENERGLVDIETLQKTQNDLIETIQETLRIQQEGKEKRQAAEIELGHMEEDLKNKLLELTQ

SEQ ID NO: 5110 - protein, 288 aa, Enterococcus faecalis
YNKRKPCFFLKGGAIVPQFASKAEEKNYYERQASLAEFLTWYHQQELPEYEKPSLTVDMVLLCYNKEADQLKVLLIQRKGHPFRNSWALPGGFVNRNESTEDSVLRETKEETGVVISQENIEQLHSFSRPDRDPRGWVVTVSYLAFIGEEPLIAGDDAKEVHWFNLERHGQHITLSHEDVEITLDLKTAASLGKDTLAFDHSEIIIKAFNRVVDKMEHEPQVLQVLGKDFTITEARKVFAKFLGVDYRSIDHSNFKKAMTQYFEELGERPVGIGRPSKIYQLKTTTGF

SEQ ID NO: 5111 - protein, 186 aa, Enterococcus faecalis
KQQQVSKRREYFLTVYLRKAEPSDLPDILAIIEDGRRTLQKSGIPQWQNGDGPNQEILAKDIDQQTCYILMVEDALAGVGVLCSEIDPAYEAIFNGSWQPHSQTTYTAIHCVALKSSFQGQGLALVLLRSLVTAARLQGATDIRIDTHPQNLAMQHLIKKAGFVYQGDVILDVNDGERYAYQMILK

SEQ ID NO: 5112 - protein, 169 aa, Enterococcus faecalis
YKPNIPFIMKVTSKFLLLRRGREQGVMFSYTDTILSIMQRIEVYNEIFKAISKEVQEYGCNQAAHRRGRDTYMFCRNNVNRFFTEEMMFRKNLEPYYDKEATKILLEGLDTYKEGVFFWLEALSESCQVTDELKYQLGIRQKESSYLLINQACKEACEGIQSAHSVHKM

SEQ ID NO: 5113 - protein, 113 aa, Enterococcus faecalis
LGPIMINNSFLLTGALLVMKGRSMVELYPDSIENVRHQLRVSLNLEKPDERDQDGYVFHTNGEFLYQSDYTVQDEAAEENEMTSINGNTYIGVPGNTQTGPLPSVKTENGFIK

SEQ ID NO: 5114 - protein, 298 aa, Enterococcus faecalis
WWTLFKREEVQPMSRKRKISLISLVIILVFVTVGSAYFAVAGSYLKKTIDKGYVPIKNDYNEAQNKDSQSFLIMGLDNTIERKLGTTRTDAMMVITVNNKTKKITYLSLPRDSFVQIDAKNYQGMQRIEAAYTYDGPTASVNTVEKLLNIPINHYVVFNFLSFIKLIDAVGGIDVNVKQAFDGVTKDGPGSIHFDAGKQHLDGTKALSYARERHSDNDIMRGFRQQEIIQAVEDKLKSGQSIMKIMDIIDSLNGNIQTDVDSNELTHLVKEGLTWTNYDKQQLSFDWRTFSNEGAQYG

SEQ ID NO: 5115 - protein, 395 aa, Enterococcus faecalis
NMTNKEPWEAWSPAKVSSFQEDFLAWYEREKRNLPWRANTDAYRIWISEIMLQQTRVDTVIDYFYRFMEWFPTIQDLAEAPDDKLLKAWEGLGYYSRARNLKVAAQQIVSEFGGKMPDTIEDIRSLKGIGPYTAGAIGSIAFNLREPAIDGNVMRVVSRLFEIDADIAKASSRKVFEAAMLKIIDRERPGDFNQALMDLGSAVCTPTSPKCESCPLQQYCAAYQADKMTAYPVKSKKVKPKDVYYVGTIIENKKQEFLLEQRPETGLLANMWLFPIEEISKKQFQQLQKLAQPAETEKQLTLELEPVTEPLVAEEPVNFFTDYETVVWQKRTLGEVVHIFSHLKWHILVFYGRNTGELATLESQRWVAAQQFSDYVFPKPQQKMVELFKKEHEKK

SEQ ID NO: 5116 - protein, 266 aa, Enterococcus faecalis
  MISC_FEATURE (13)..(118): Amino acids 13, 68 & 118 are Xaa wherein Xaa = any amino acid.
VTTFTRISKDKVXFYLLWYSSGEKLRVSEDILSRQLLLKGQELSDTLIEEIKKAVSYDVGLQMAMNYXSYQLRSKKEIFTYLKEKEIVPEDRVKIVQRLEELRLLDDAIFSESYVRTXMRTSDKGPRNVAQQLKQKGISEEDIQHGLTFYTLDEQLNVATATAEKAMKRYRTKSFKDALQKMRLHLMQKGFTNEIIDLALESLAFEKDEEQEQQALDKEGERLWRANQRFDFSKKVQKVKQSLFQKGFDYDLIQQFISEKEVEHDE

SEQ ID NO: 5117 - protein, 69 aa, Enterococcus faecalis
  MISC_FEATURE (25)..(25): Amino acid 25 is Xaa wherein Xaa = any amino acid.
KWQDKINFKKFSVGNQFLAIFSESXYDTYSSKKRSGSMYQVITMYGDNEPWWFFDDWQEDIVQEKTSIT

SEQ ID NO: 5118 - protein, 102 aa, Enterococcus faecalis
LARGHCSRKNLDNLTDAETYYVEVWQKLSQNYTYVNTKPNYLTAFWNDGEERWCEECDEDLQQYFGLALLENHHAVTFENKAEFTTISNHFGKTKFCKRKVI

SEQ ID NO: 5119 - protein, 769 aa, Enterococcus faecalis
KIIMRLLLKIKLSLPQYPIILAKQNSANGKLFETHEFKEKPQGIFFKLFFYSRNLEKIEPIFGIIRKDSTQKGAKLVVAKQLIIAEKPSVAKDLSRVLGANQKNKNYYEGPNVIVTWALGHLLGLKMPEDLNKEWQTWQMETLPMIPKNLGIKPLPKTGHQLKAIKQLANRKDVSEAVIATDAGREGELVARWILEYVRFNKPVKRLWISSQTDKAIKDGFKKIRPAKDYDNLYYSALARAKADWLVGLNVTRALTVKYQDNLSAGRVQTPTLAMVRQQEKTIEQFKPQTYFTISLSVESEKAKMTQKNPYALKERQEAEQLVKELSKQKGLVTDIQEKVKTENAPLPYDLTEIQREANQRFQFSAKKTLSLVQSLYETHKIVSYPRTDSKYLTTDMKGTMKERLQAIADFSPEVKGYLKNGAVVKQQKVFQNAKVTDHHGLIPTEQRPRYEKLSNDEQKIYQMIVQRFLGLFAEPNQTKQTKVTVAFGKETFVFHQNKVVVAGWKTTAEQPLSTVQWQKGMTVAPNFTINKELTSPPKPLTEGTLLGKMEKHSLGTPATRAEIIEKLIKSELMERTNSGLSVSAKGKQLLDLVNPSLVTPELTEKWEKSLEAIASGQQKSQLFLKDIEEDTKKLVREIKQSEKKYQDFSITQKKCPDCGSNLREKNTKDGKIYVCTNQECSYRRRKDPKVSNHRCPQCHKKMVIIEGKNGRSFKCKFCSITEKIPDKKERKQKMTKHEERRLMKKYSQPDEPEESALAQALKAAMNQE

SEQ ID NO: 5120 - protein, 307 aa, Enterococcus faecalis
IIKSSLLVFSKLSNRKRGTRMLANLNQAMDYIEEHLTEEVSFDELAKKTGISVYHFKRTFSFITGMSLAEYIKKRPLAEANLALLAGEKVTDVAFKYGYQSIEGFSRAFRDWSGQAPSEVMKTQIQKTFPKFSFYIDIKGGQSMDVKLIEKPAFQIVGVSQKVPLQYQGENQAIMELAQRITPQQRAEMHTFDDIYPHQVVNASFDFQEGRTTEGGEMTHMIGFATSQENTYEDLEQLSVPAHTWAVFPNEGPFPQTLQETWAKIFSEWLPSSGYQVVAAPEISFTQYQGPAEAKYSEIWLAVTATK

SEQ ID NO: 5121 - protein, 120 aa, Enterococcus faecalis
VMRIRNHGEKIILRGFRVMLFRMVPKQQTLVQHNDYSFRVMLFGMVPKQTFLIWLFLPCFIAMLLKNKLSPQAIRNFHHKIRIFIIKDELLQFSKTNQVISQNVDRLRLVLPFFRKGFFY

SEQ ID NO: 5122 - protein, 490 aa, Enterococcus faecalis
TIQVSLFLCVEANQGGNNMFDIVTLARIQFAMTTVFHFFFVPFSIGLALVVAIMETMYVVKKEERYRKMAKFWGNIFLLSFAVGVVTGIIQEFQFGMNWSDYSRFVGDIFGAPLAVEALLAFFLESTFLGLWIFTWDKMNPKVHVTFIWLVVFGSMMSAFWILVANSFMQHPVGYVINNGRAEMVDFVAVISNPKVWYEFSHVIMGAFTLGGMAVAGMAAFQLLKKRDISFHKASMRIGLWVTLFGSIGVLLAGDLQMKALIEGQPMKFAAMEGAYEDSDDPAAWTLIAWADEREHKQVFCIDIPYMLSILSYNKLSGSVDGMDTVNKRLVEKYGDDKNYYPPVNTLFWSFRIMAGFGALMLLVAALGLFFTRKKKPSLYEKKWMLWIVALCTFAPFLANTTGWLVTELGRYPWTVYGLFTIEQSVSPNVSVASLITSNVIYFLLFAGLGSVMVYLVILELRKGPDYEAKKLAKENEPALDPFDKGVFGE

SEQ ID NO: 5123 - protein, 342 aa, Enterococcus faecalis
GGIWRMSTLQLLWFVLIGVLFSGFFFLEGFDFGVGMAVQTLAHNDDEKDQVVATIGPVWDGNEVWLLTAGGAMFASFPYWYASLFSGYYLILFTILFGLIIRGVSFEFRHNMPEGKRRRMWNWTLSIGSFLVPFFFGILFISLVQGMPLDANGNMHAQFTDYFNLFSIVGGVALTLLCYLHGMNYIALKTEGPIRERARNYAEILYGVLYIGLVVFAVLMYFKTDFYEKNFAVTLILTLAIVVLTVIANVGVFKRKEMLAFLASGLTLVVLVALLFSGLFPRVMIGSEGFDLLIKDATSTPYTLKIMTWISLSILPFVLPYTAWSYYIFRKRISQTAVPEGV

SEQ ID NO: 5124 - protein, 263 aa, Enterococcus faecalis
KTSPADLDEMVNAEHHRGVSGHVATEDIKFGYCTEIMVRIGEGPTVDSAFDYETFRNYLNELGDSLLVVNDDEIIKVHVHTEHPGEVMNYGQKFGSLVKIKVDNMRLQHETLVERDAQQEALTEKVRVPFAVIAIAAGEGVQELFRSLGASYIISGGQTMNPSTEDILKAVKEVNAEQVIILPNNKNIFMAADQAAEVADVPVAVVPSKTISQGMTAMLAFNDQQSLEENKASMTEMLDSVVSGQVTTAVRDTTIDEVEIKKD

SEQ ID NO: 5125 - protein, 209 aa, Enterococcus faecalis
GEEKMGTSMMTQLFGEFFGTMILVLLGDGVCAAVNLKKSKAFASGWVVIALGWGAAVTLAVYMSGYMSPAHLNPAVTVAMAITGNFEWGMVLPYIVAQVLGGFIGGLVVWLAYLPHWNITEDKGAILGTFATGPAVRNYPANVLTEIIGTFVLVFGLLAFSQNDLAAGINPMLVGILVLGLGLSLGGPTGYAINPARDLGPRLAHQSLP

SEQ ID NO: 5126 - protein, 617 aa, Enterococcus faecalis
VNGKGEFSMTFSIETRRQSIDALKTQHLDVLIIGGGITGAGVALQASAAKMKTGLIEMQDFAEGTSSRSTKLVHGGIRYLKTFDVEVVADTVKERAVVQSIAPHIPKADPMLLPIYDEPNATFNLFSVKIAMDLYDQLADVTGTKYANYLLTKDEVLAREPQLKSEGLQGGGVYLDYRNNDARLVIENIKQAVADGAHAVSRVQAVGFLYNDEGKITGIQAKDLLTDEQFEIHADVVINTTGPWSDKLRGLDKNDSFTPQMRPTKGVHLVVDKSRLNVPQPTYFDTGKQDGRMVFVVPREEKTYFGTTDTDYHGDFQHPTVEQSDVDYLLEVVNNRYPEVQLTIDDIEASWAGLRPLISANGGSDYNGGNNGKLSDKSIDEVIDVVDRYQKNQTDKREIEEVLNHLEDSLVENKVNPSAVSRGSSLERSADGLLTLAGGKLTDYRKMAEGAMKMIQTILAEEYQKEFTLIDSKNYPVSGGKLNPATVDEELEALAKHGVFKGLSEKDALYLAHLYGSNVPTVFEMIDDAKVIPGLTLTETVSLNYAMEEEMALTPVDFLLRRTNHLLFMRDRLDQVKAGVIEEMAQHYQWTAEERARHIETLEKVIEESDLKNLKVG

SEQ ID NO: 5127 - protein, 513 aa, Enterococcus faecalis
RKRFQKRLGGIIMAEEKYIMAIDQGTTSSRAIIFDKKGNKIGSSQKEFTQYFPNAGWVEHNANEIWNSVQSVIAGSLIESGVKPTDIAGIGITNQRETTVVWDKATGLPIYNAIVWQSRQTTPIADQLKEDGYSEMIHEKTGLIIDAYFSATKVRWILDHVEGAQERAENGELMFGTIDTWLVWKLTGDTHVTDYSNASRTMLFNIHDLDWDQEILDLLNIPRVMLPKVVSNSEVYGLTKNYHFYGSEVPIAGMAGDQQAALFGQMAFEPGMVKNTYGTGSFIVMNTGEEPQLSKNNLLTTIGYGINGKVYYALEGSIFVAGSAIQWLRDGLKMLQTAAESEAVAKASTGHNEVYVVPAFTGLGAPYWDSQARGAVFGLTRGTTREDFVKATLQAVAYQVRDIIDTMKEDTGIDIPVLKVDGGAANNDFLMQFQADILNTAVQRAHNLETTALGAAFLAGLAVGFWKDLEEIKAFQEEGQQFEPIMAEEEREDLYEGWQQAVAATQQFKRKNK

SEQ ID NO: 5128 - protein, 498 aa, Enterococcus faecalis
WVLRLIGERTMKVETLLEKKAMRQLLTVQQTILAGGTCSVSDLTAFLAVTKASFEKDLEDLHYFLKPFGQDCQLTYDGQQLSITLSDFFSLNHLIEAFVKESLKFQLLDYLYRNKEFSIVQLTTKFMISESSLFRKIKELNQLLAVFDLQIKNGQLQGEELQIRYFYFQLYWYITPYEIHQKKTMSPLNKRIIEGIETGLGFTFNEHNALKVSLWLSITKKRLAVTSKKYQQLRKKMIDFKEDPLFKQVRQLFFRFSSRYSLELDEGESMIHFVFLITMSVLPESAFDEYSLIRGRRSAVSLADTFILENVVLYYRPHKFEPTLEKTMAYYFSQIHGKLYFFKGELEVFDRAHIWEKEQQLSSRELASFSTTLLEKALACFDETYQPGDSLHELSLVKYLSVLALIEFKMIGEIKIGIHLAMDALYQAALTQVLMLSLKNMNGTLVERYQPEQTYDLIVTNYQQTSYQGTPEVYVLSELSSTYDVQQLKKKIRTLREK

SEQ ID NO: 5129 - protein, 440 aa, Enterococcus faecalis
LLVHHSQVFPQQLLQGKKYPQAEISLIDKQATVGYLSGGLSAYFNHTINELHEARYITEEELRRQKIQLLLNREVVAMDVENQLIAWTRKEEQQWYSYDKLILATGASQFSTQIRGSQTEKLLKYKFLSGALAAVPLLENSQTVAVIGAGPIGMEAIDFLVKMKKTVHVFESLENLLPKYFDKEMVAEVQKSLEKQAVIFHFEETVLGIEETANGIVLETSEQEISCDSGIFALNLHPQLAYLDKKIQRNLDQTIAVDAYLQTSVPNVFAIGDCISVMNEPVAETFYAPLVNNAVRTGLVVANNLEEKTHRFIGSLRTMGTKVGDYYLASTGLTETEGLFFPQTLASIIVRQPAPPLQHGTEILGKLIYDKVTQRVLGAQLCSKNNCLEKINTLALSIQTGQTLTDLLQKDYFYQPSLTNIYDITNLMGASAYWRENDES

SEQ ID NO: 5130 - protein, 1216 aa, Enterococcus faecalis
RPPIYKSGRPYLYIGNDITTSAATTAKVIPDTVTASNMTFYALQGKVNHLVITGNSADPISMDQTAPTGSKTLGFNQNIYFGSNITLRNLNYTGTNMYLNGYSLNLNGGSSGNGLTVYGGTDTGDVSGNPTLTVNSTGTGTWNFYGGNQNGGNLAGNPTIVINNTRSGLNTLSGGANIGTVTGNTSLVVNDSGGRIASIYGGGYGTNATNTANVTGNVSTKVAITNAATGFQLSTYYGGVQYGNIGGKVTNDISGYGRWYTAGQRFIGGSSRGDIGTNRATDGITTNLNTQLYSAGRADFEGGNQYSGTIIGDITNVVTAGTNSAGGINDFNGGAGNNVSKFNKSQIGASNEATYDAYTPQQRAELAKSAAAFKVFGNISSKLVSGSFNNGAIYSTAAGRGGYIEGNTTIEVGTANGDGSLGGDGMAYSGAKPTSLDYSTTDKSRGYSSGWDIVGGGGYPASNDTWDIYIKGDTKTVLNNTIARWTYGGSFSGVVEGNTSNTLNGGIADTLEGTGYQAARVYGNGQTIVNNGQVDWFLSGGGWNDAKNVGNVGVTVYEGVINASMGASYGASGGHTITGNSDNRIYGGNFSGTPRTGANGFSGGITNAGSLLGNAKLLIDLRNYNGEFKLPGNTYITGGRPYGQNTTLGTDESNTITLNIFTKTGVESLNGASIYGDGGTNAAYTKNGKITMNIQAAGSSIGNLYATQYSNISGGKILRDVTANVQGAVSINGLSGGSSTDNFTNAIVNASSNKVAFNFGTNVDGTNNYQTEPLNATGLGVVNFTELNVTNGIKLMANGGNIKNGVSATAANHSTTYNEFGSIHLSKNAGIGITNTANLISASKLTVQDHATLETIPGTGKVNIADFEAVDPTKDELLWIKPTTDTTALVDSTGTWFGNVKAYQVLTINPTVNNATKLTPTTFHGIEKATGKTFIGDNDVTKGANGYGIAIPGSIIDYEVETPGIVAGAGTISHDVKEVKAGNAPLTLQAWGTEVAGQKVQKGRLMIPTSSALTPTLSFLPDEVTGSWLHQGTVKSSEVGSAIEQIPEQKDTTPLSWKATNMNYSYQVKVQFSNKVELSGQSVIVTEDEAAQLTTVDKVVEMLGAKGRPFFKTSLKETDLPQIQAPLAEKTVSRTHDIQLEAGTSGDNLQNKTVHLVVVKNESILAKDRSFALYATSAHLKLKEANGLTNSDELVGTMDTSNGDFRRWSGQSNTKS

SEQ ID NO: 5131 - protein, 206 aa, Enterococcus faecalis
RIQTSWLAQWTQATVIFADGRANQTPSLDAATFQAIQQAKPEELAKTVPANYQFTEAGETLNKKVNVSISGELTLEKVPKTIDFGKQKISAKPEVYWPTLSDDLVVQDTRGSESTPWKLNVQVTNPLTNGTDQLEDLSLVTDKGEFLLNKGDTVVTENEGSGSGSYTINQGWGAANQRGLKLSVPVEKQKVGEFKGTLSWSLVMAP

SEQ ID NO: 5132 - protein, 140 aa, Enterococcus faecalis
SWHHNKEERSEMKKYLLLSCFLGLFSFCHSDTAFGEAAYENSGVVSFYGTYEYPTEESTTATSNSSTTTEPTKPADGGASSVLSSGVYGSRQGRLPATGTTNQAPFIYLGISLITIGILFIKRRREDEKNSISSSRDCRI

SEQ ID NO: 5133 - protein, 88 aa, Enterococcus faecalis
  MISC_FEATURE (78)..(78): Amino acid 78 is Xaa wherein Xaa = any amino acid.
AYYLLKGEEKMKKTVLAVVGIVGFSGVLATQQAFAEDINVNYTSNGAITFEPDTDPTKPVNPTNPDEKVEPEDPTDPXGPNPGSAGLL

SEQ ID NO: 5134 - protein, 94 aa, Enterococcus faecalis
LPVVKTMQKKEFHIVAETGIHARPATLLVQTASKFNSDINLEYKGKSVNLKSIMGVMSLGVGQGSDVTITVDGADEAEGMAAIVETLQKEGLAE

SEQ ID NO: 5135 - protein, 576 aa, Enterococcus faecalis
IMSEMLKGIAASDGVAVAKAYLLVQPDLSFNKTSVEDTDAEATRLDDALAKSTEELQAIRDKAAQSLGEAEAQVFDAHLMVLSDPEMVGQIKQNIQDNKVNAEAALKEVTDMYIGMFEAMDDNAYMQERAADIRDVAKRILAHLLGVTLPNPSMINEEVIVVAHDLTPSDTAQLDRTYVKAFVTDIGGRTSHSAIMARSLEIPAIVGTKEITDKVKAGDILAVNGIIGDVIIDPTDAEKSEFEAEAKAYADQKAEWDKLKNAETVTADGKHVELAANIGTPKDLEGVHKNGGEAVGLYRTEFLYMDSSDFPTEEDQYQAYKAVLEGMEGKPVVVRTMDIGGDKELPYLTLPHEMNPFLGYRALRISLSELGDGMFRTQMRALLRASVHGNLRIMFPMVATLKEFRAAKAIFEDEKQKLVNEGVEVSNDIQVGIMIEIPAAAVLADKFAKEVDFFSVGTNDLIQYTMAADRMNERVSYLYQPYNPSILRLIKNVIDAAHAEGKWAGMCGEMAGDQTAVPLLLGMGLDEFSMSATSILKTRSLMKRLDTTKMAELADRALKECDTMEEVVALVEEYTK

SEQ ID NO: 5136 - protein, 362 aa, Enterococcus faecalis
NNFMQYLVIKNCQKGVHTMNQQLFKWLHAISVIIFLFFIGSYSVEASEMTFSVKAILPDNQRTKETSYFDLRVAPNQTQKLQIELTNQTANDITVLASANAAITNDNGLADYSHAETKKDPSAPFTFNEIAQLPKEIHLPKHSTKTVECQLTLPEKPFNGYVLGGLYFEQKSDEQPAHSENGVAINNRFSYVVGVLLSETDEPVQPELSLNEVKTDQANGRNRVLMNLQNKQAAMIKKLQVDASLYYEKETKPRYENHQESLTMAPNTNFNYRIDLKEQPFVPGNYTVKIKANDGYQDYSWEKHLVIQEKEAKKYNATAVNLPPEKHTNFPWKLVSSITLVFLFILGSTIYYFKKKIRESQQ

SEQ ID NO: 5137 - protein, 246 aa, Enterococcus faecalis
KMKKIVRISSILFVATPLMLLNSSKVEAAQVASIQSNADITFALDNTVTPPVNPTNPSQPVTPNPADPHQPGTAGPLSIDYVSNIHFGSKQIQAGTAIYSAQLDQVQNSTGDLISVPNYVQVTDKRGLNLGWKLSVKQSAQFATSDSTPAVLDNASLTFLAATPNSTQLLSLAPLTVPVTLDPTGAATSPVATAALSTGMGTWTLAFGSGATAAQGIQLTVPATTKKVAAKQYKTTLTWILDDTPL

SEQ ID NO: 5138 - protein, 93 aa, Enterococcus faecalis
AAVAPLPKANVQVPIPVERAAVATGEVAAPVGSKVTGTVNGAKESNCVELGVAAKKVKDALSKTAGVESLVANCALCLTDNFQPRFRPRLSVT

SEQ ID NO: 5139 - protein, 310 aa, Enterococcus faecalis
LPPIRLVRTVLSCASTNGYANHWKRKNAQGLWEAANSVVSGQIIRFTLTTRLTNQPATWMNQQLRATVPKGLSQLSAATLTKQSAAGLSTPIAGLQLLTDSSTGLPYWSYHNSLPADNFTEANTQFTLQYTATVTEEWINQFLLFSSTVTGNDGGGTPITPITKEQSLPIKNGTLRFVQMPTTVSFKNLPFPSKRTIYSPSTISAPFLIADGRVAKTPWHLLVRESQPMHSTCTNKTIQPAFIYPKNGSDFPLSSLATEVYQHTATDDNNVEIPWNQQNGLFLSVAPDLNLTVKESYTAELQWILSDTPL

SEQ ID NO: 5140 - protein, 68 aa, Enterococcus faecalis
PAHTPGEDCLILCLNERLRKSLEAEKCTRALGSCKLCRKWSNHSFYVNHTFNQSTSNVDESAITSNGA

SEQ ID NO: 5141 - protein, 510 aa, Enterococcus faecalis
YYLLFSYIKLSRGMDKKMSNWETKFAKKGLTFDDVLLIPAESHVLPNDVDMSVQLAKNIKLNIPLMSASMDTVTDSNMAIAMARQGGLGVVHKNMTVAQQADEVRKVKRSESGVIIDPFFLTPTNLVADAEELMSRYRISGVPIVETMENRKLVGIITNRDMRFVTDYQIKIEEVMTKDHLVTAPVGTSLKDAEKILQKHKIEKLPIVDEAGRLSGLITIKDIEKVIEFPNAAKDEHGRLLVAAAVGVTSDTFERAEALLEAGADAIVIDTAHGHSAGVIRKIKEIRETFPEATLIAGNVATAEATKALYDVGVDVVKVGIGPGSICTTRVVAGVGVPQLTAIYDAASVAREYGKAIIADGGIKYSGDIVKALAAGGHAVMLGSMLAGTDESPGEFEIYQGRRFKTYRGMGSLGAMEKGSSDRYFQGSVNEANKLVPEGIEGRVAYKGSVSDIVFQLIGGLKSGMGYVGAADLKALREEAQFVQMSGNGLKESHPHDVQITKEAPNYSVQ

SEQ ID NO: 5142 - protein, 427 aa, Enterococcus faecalis
GGKNMLDVKMMRQNFDEVKAKLQTRGVKEEILVEFLRLDESRRDLLVKVEEMKKYRNDVSAEIAQLKRNKEDATAKIAEMKEVGGNIKALDAEINAIDEELRGITTTLPNLPDDSVPVGAGEEENVEVRRWSEPRTFAFEPKPHWEVAENLGILDFERGAKVAGSRFVYYKGLGARLERALYNFMLDLHVYEHGYTEMITPYIVNDTAMFGTGQFPKFKEDVFQLQDTDLTLIPTAEVPLTNYYNNEILDGKDLPIYFTALSPSFRSEAGSAGRDTRGLIRLHQFNKVEMVKFSDAEHSYEELEKMTNNAEEILQKLGLPYRVMALSTGDMGFSAAKTYDLEVWIPAQETYREISSCSNCEDFQARRAMIRYRDENDKVQYAHTLNGSGLAVGRTVAAILENYQNEDGSVTVPEVLVPYMGNLTVIK

SEQ ID NO: 5143 - protein, 60 aa, Enterococcus faecalis
SKVDFLYYSSTLTAYQQEIRELIDIPELFRYSIEKRKLREKVFMALNSREFAGVRANIHL

SEQ ID NO: 5144 - protein, 417 aa, Enterococcus faecalis
EIRLKKQLVEKKSFKQCGELDIRSMLVKPKKIEKQKRITLTSKEISELLAEAIVTIVLLLLLNVSIMFLLGQLLSENSPLAGVIWATKDAVAKELNTDLFWSWNKFVLPIFFLVDAAVLYWRLIRRYHQMQLRHIISELHYIADGNYNHRIPFELSGDLAKVVTSINGLVDSTVAAIEDERRIEKSKDELITNVSHDIRTPLTSIIGYLGLIEDRQFHSQEDLLKYTHTAYVKAKQMKLLVDDLFEYTKVRQPSVPIHTTTFDMAQLIEQLAADFELEAKKINMQIQVKANPASLMMEGDTEKLVRVFNNLLSNALKYGKGGHHIVMEVDKVGTEAIIAVRNDGPAIPKHSLDQLFDRFYRVEESRSQETGGTGLGLAIAQSIVALHGGYIYAKSDQKWTSFIIHLPLQRTNKKSES

SEQ ID NO: 5145 - protein, 231 aa, Enterococcus faecalis
TLMKILVADDDKEIVELLSIYIHNEGYEVVKAYDGKEALSKLHTTPDIDLLILDIMMPIMDGMEVVKELRKESQIPIIMLTAKTTDMDKIKGLVAGADDYVTKPFNPLEVMARVKSILRRSQMQLTKEEPDELEVGPLMINKDSHEVKTIEGKEIQLTALEFGILYLLASHPNRVFSADEIFERVWQQESIVSAKTVMVHVSHLRDKIEEATGGEKVIQTVWGVGYKIDAR

SEQ ID NO: 5146 - protein, 138 aa, Enterococcus faecalis
AKKTGIGKSSISDWLAGRYEAKQDKVYRIADALDINEAWLMGQEVPMEKNASTIDRIYKKLEPQRQAIVYQFAEQQLHEQQTQAEILSFPRRDEMTLAAHAGDPEKIFSKEEIEKIHDYLDEIDAKYQQSISSDKKED

SEQ ID NO: 5147 - protein, 163 aa, Enterococcus faecalis
WQVNGKVNDYEKLVSSIQKDVTVLEIDLYNQTGCYGLYRNGKIYIEKTLSTRQKKNILAEEYGHYQTSVGTILNQNCTENRKQELKARNVALEQLVTLDDLIRCSEAGLSNHYSCAEFLEIDVETLKNVITYYRQKYGATYLYKGRIFEFRDYSVMVLNTGLT

SEQ ID NO: 5148 - protein, 83 aa, Enterococcus faecalis
NSHGGAKMKRIVVFYKNGDRYLKEMGSGKSSLYFFLFFFVLHSMREHIIQFIGFWPSFIFVLILVPNLMLGVGHINHWYKKRS

SEQ ID NO: 5149 - protein, 121 aa, Enterococcus faecalis
LEEDTMANYRDRRVGQEIMREVNDILNKRIRDPRVQGITITDVRVTGDLQQATIYYSLLSDLASEQQKAQQGLDKAKGLIRKELGQRLTLYKTPELIFERDESVQYGNHIDELIRKLNQGE

SEQ ID NO: 5150 - protein, 802 aa, Enterococcus faecalis
EGDCMGKKRIYELAKEMNKASKDVVDKAHQLGMDVKNHMGAISSEQETKLRQAFGGGSTVNTQSKATNNQKQQTTQNKPANKKPMNNKPGEQRNNQNRPNNQSTNGQQRNNNNQNRHGQSNTQNRSNQTNTNNQNRNTQNNNGSTTNQNRTSQNNNGGNNQNRGGQNRNNNFGGGQNRNNRNNFNNQNRNRFNKKGKKGKHQQESAKPAVPARKFRELPDVLEYTEGMNVADIAKKIHREPAEIIKKLFMMGVMVNQNQALDKDTIELLAVDYGMEPQEKVQVDIADIDKFFEPEAVVEENLTTRPPVVTIMGHVDHGKTTLLDTLRHSRVTSGEAGGITQHIGAYQLDIDGKPITFLDTPGHAAFTSMRARGASITDITILVVAADDGVMPQTIEAINHAKAAKVPIIVAVNKIDKPGANPDHVKQELSEHELIPEEWGGDTIFVNISAKFNQNIDELLENILLIAEVEDLKADPTQKAIGTVIEARLDKGKGPVATLLVQQGTLHVGDPIVVGNTYGRVRVMTNDMGRRDKEAGPATPVEITGLNDVPQAGDRFVVFEDEKTARQAGEERAKRALLEQRSASSRVTLDNLFESLKEGELKEVNIIVKADVQGSAEAVSASLQKIDVEGVRVKIVHAAVGAINESDVTLAAASNAIIIGFNVRPTPQAKQQAEQEEVDIRLHRIIYKALEEIETAMKGLLDPEFEEKITGQMTVRELYKVSKVGTIAGCYVTEGFIRRDSGVRVIRDGIVIYEGKLASLKRFKDDVKEVKLGFECGAMIENFNDLRVDDAIEGFIMEEIKQ

SEQ ID NO: 5151 - protein, 112 aa, Enterococcus faecalis
HIKKPAKSCLAMENKTKILNLLGLAMRAGKLVTGEELTLKDIRANKAKFVFVAQDASENTRKKIKDKSSYYNVPVSELFSQFELSQAIGRPRMVIGVTDAGFATKIKELLKG

SEQ ID NO: 5152 - protein, 109 aa, Enterococcus faecalis
TRITFLEGEKMKKRKIPMRKSVVSGEMKPKKELVRITRSKEGEVALDPTGKLPGRGAYVDLDPAEVQKAWDKKILDRVLETKLSDEFYQELLDYVTHQKARKELFGDGK

SEQ ID NO: 5153 - protein, 206 aa, Enterococcus faecalis
VQSVCRGFFISSKKRTKTFKGAESVMETFERNWYVLHTYSGYENKVKANIESRAQSMGMGDYIFRVVVPEETEKEVKNGKEKEIVHKTFPGYVLVEMIMTDDSWYIVRNTPGVTGFVGSHGAGNKPAPLLQEEINHILRSIGMSTRQSDLEVALGDTVKIIEGAFSGLEGVVTEIDEEKQKLKVNIDMFGRETSTELDFEQVDNID

SEQ ID NO: 5154 - protein, 61 aa, Enterococcus faecalis
  MISC_FEATURE (41)..(41): Amino acid 41 is Xaa wherein Xaa = any amino acid.
LPQFGKHLIIEQDPLAKKNNDIFGHVSFFIIPFGDELKKGXEKKSVDCFPRPYNLYQSAAQ

SEQ ID NO: 5155 - protein, 236 aa, Enterococcus faecalis
KMKHAQKYRYFSLLMGLVLLLSACQIGATTKDDNQAATKESTVELNRTTTPTLFFHGYAGTKNSFGSLLHRLEKQGATTQELVLLVKPDGTVVKERGALSGKATNPSVQVLFEDNKNNEWNQTEWIKNTLLYLQKNYQVNKANIVGHSMGGVSGLRYLGTYGQDTSLPKIEKFVSIGAPFNDFIDTSQQQTIETELENGPTQKSSRYLDYQEMINVVPGKTAHFINWWSIKSNRFK

SEQ ID NO: 5156 - protein, 80 aa, Enterococcus faecalis
LMLFQEKLPILLIGGQLSPTDLSDGTVPLSSALAVNALLRQRGTQVTSQIIKGENAQHSQLHENPEVDQLLIEFLWPSKK

SEQ ID NO: 5157 - protein, 247 aa, Enterococcus faecalis
SDKGGLLMNLDYLKETYHLTKTESQILYYLDQQSTNAADLSIREVAKHCFSSPSSIIRLAKKLNLSGYNELIYKLKEAHFSQPIPFETAPSFETTNEFCRLLAKHKSHLFVILGHDFSRHLAAYISEVFNFHGIPSITTAYTHSINSQNNQNFLFIILSHSGEEKYLKETALLAKEKKHPIISFVGAKNSTLGRLADLVFSTDSYSPFSTSVAQPQMFFGQTLITFEALICAYLNHEDSIPISHKNK

SEQ ID NO: 5158 - protein, 545 aa, Enterococcus faecalis
GVFMKRATKQRLSLAAIMVLLLSGCGSVGKETKKQEQQVLRVGIDSELSTADVSLAMDNTAADVMSQVGEGLFSFDEKGEAKPALATEKVQPSNDGLSYTFTIRKDAKWSNGEPITANDFEYSWKRTVDPKTASPQAYYFEGLKNYRAIVDGSKSKEELGVTAIDDHTLEVELSYPMSYFQQLLAVPAFYPLNEAFVEKTGKNYGTSAESTLYNGAFTLEGWDGTNNTWSYVKNKNYWDQANVSLDKVDVQVVKEVNTGKNLFEGKELDVVKISGEIVAQEQGNAALKIREIPGTYYIQLNTQKDLLANKNARRAIALSLNSERLAKNVLNDGSKKALGFVPTGFTNQETQKDFAEELGDLNPSEPEKAKELWQTAKKELGIEKAELTILSSDTENAKKISEYVQGALADNLENLTVNVSPVPFNNRLEKSRSGDFDIVVGGWTPVYADPIDFLNLLQSKNSNNFGKWSNKTFDQLLQEANVTYANKYEERWKTLQKADQLVAEEAPLVPLYQLTEARLVADSVQNLVYGPLGSGYYKSVSIGDK

SEQ ID NO: 5159 - protein, 385 aa, Enterococcus faecalis
VQAITNQSLSATSKGWEKMKKSQAVQLIQELSNANGVSGFETEVVRILQHATADFTIQRLDSIKNLYLEKKNNLSEGPVVLFDAHSDEVGFMIQAIKENGLLRFFPLGGWVPNTISAQKVRIRNREGTYLPGVVTSRPPHFMTPEERQRPLTIADLTIDIGATSKEEVIETYKIDLGAPVIPDVTCCYNEQTDLFLGKAFDCRIGCACLVDVMEELKEETLPFKLVATVTAQEEVGERGALIAAKQVNPDLAIVFEGCPADDTAETPEMIQSAMGKGPMLRYFDVSMITNPEFQEYALEIAKIHKIPVQVSVRSGGGTNGMAITQVQGAPTIVVGIPVRYAHTPHCYVDFQDYQAAKELVIQLIKNLDADKIQALVQPLSKEWNK

SEQ ID NO: 5160 - protein, 296 aa, Enterococcus faecalis
QNSSTGSAIVKGVEQMKIYVSCDIEGLAGIATFDMEKEDTVLFRELYHQHVAWLIEGIQKSAKNEQITEITIADSHSRGLNLAYARLAEMDERISLVSGFPRMDYMMSGLDSSYDVVFFLGYHAGIGKQKGNMDHGYSASVAYDLKINDLAMNETTINAAYASELGVPVGLIIGESGLEEQLFQEKMMPEVPFVSTKEFLGRYAIKNRPMQQVREAIVATTSQVLTSFALSELPRYALQTPATVKLQCVTTAQADRIEMLPMIKRIDGRTVSFVGETMKDVMNGIVAVVGLGGTSY

SEQ ID NO: 5161 - protein, 294 aa, Enterococcus faecalis
RSNTMFYSIEDLVAQAKDYPSVSELMIATEMAHGGYSRERIIETMEKNLAVMKQSVAEGIAGVTSVTGLTGGDATRLNDYIHSGNFLSGETILQAVRNAIAVNEVNAKMGLICATPTAGSAGVVSGVLLAVIDRLKLTHQQQLDFLFTAGAFGLVIANNASISGAEGGCQAEVGSASAMASAALVAASGGTPDQSAQAVAITIKNMMGLICDPVAGLVEVPCVKRNALGSSQAFISADMALAGIRSVIPPDEVIHAMYQVGRQMPQIFKETAEGGLAVTPTAQRLSKEILEKQK

SEQ ID NO: 5162 - protein, 154 aa, Enterococcus faecalis
GGLLGMEPDDEQLSNSLEIAYEQGMEVCFIPKSEKADHPNSVKIVVSSGDRKLSVTGISIGGGNIQISELNGFKLSLSMGTPTFIVVHQDVPGMIAKVTNILSASDINISTMTVTRESKGEKAIMIIEVDQAEVGDIVMQLAEIPHIYSVNYFD

SEQ ID NO: 5163 - protein, 74 aa, Enterococcus faecalis
MTLSKKSGLTNRQIKEICSKFNCRKNEFAVQKYQDSFLLAVNNKEYRVKFSEGIFSKIMYIKEVQRISKKVGRK

SEQ ID NO: 5164 - protein, 361 aa, Enterococcus faecalis
CCRGLMKCLSVFFLLKGEIMKKLGKVLIVSCFIFILPFLLFLGVFSSSESGDSSQFQPATPQEKVALEVSNYVTSHGGTLQFASAWIGNMEHESGLNPARIQSDLSFNSAIAFNPSLGGYGIGLGQWDSGRRVNLLNFAKSQKKEWKSVALQMDFAWNKDGSDSDLLKRMSKSKDVNTLAVDILKLWERAGTKDDPAEQVKRKASANNWYKRLSTGSMGGGSANVGGGKIDALEKVMGQTINGGQCYGLSAFFVEKQGGLQMMGTGHMFASEIGNDYPWSSIGWTVIKNPNYSDIKAGDVINFGQGGVATSIYGHTGVVASVEGKNKFTTYEQNAEQGQIVAKYFRTWGLDFPHVTSIVRK

SEQ ID NO: 5165 - protein, 77 aa, Enterococcus faecalis
NWEESPLSLEENTPKNNKKGRIKIKQLTIKTLPNFFMISPFNKKKTDKHFISPLQHQNYILPYSHYQKIVPLFVLNY

SEQ ID NO: 5166 - protein, 686 aa, Enterococcus faecalis
EGSEKMQYLIDSYSAYTVDGGLLDKGWQVMNWFFVDIPFFILRMFASFFLFCENVLNQSSFFEGKQETVLNMSKDVLSGFGGKGFRGGSLLALAILISAYYLLYHFFSSRRSFSKVFLHYLAVVVLFVFWFGSVSTSTGTTSGSTFLIQSTNAIAKGVQSTFTSSANLGTEGSKDGEVYQSPIFDATVKQTFNFVNSGSLDGKMENGKKLDESKLLEKPKLSKEEKEKFEKNRKKYIDKVVDDNPYFAQDGAKTMEKAFGVGVGVVNLAVLAVPVTYINIMLNVIQIIVDLLILVFPIIALVSFFPRCQMMMFKFFKSLIGILFLPVVFGIFLSVLFWINKLIDQAFLGLMDKVSSSLLMVMSGGVFLLGTLIVTALVKIILYRKIWKSRYKILSFFSDGQVQQPSFESKMNEKTKETVERTGEIGVGAVKAGIGASTGNLALAADGASHLMPKHDKALNLAKDHFIDDNGQFAGVKTGLNSLLNRSTQEEQQPLKDDLLPEEEIVEVEEPTNVDNEELEEIEDKALTDEVDNFEDLTDDEMDNSLEEIDVPVLDETVSDSDTSLADESNIELEPIIENELDSLDSSVESSENDREEPIHEVDEQEIADNLNVTVDNFDELAFAREERAFFDGGEDSELITNNNDSLNNVYSFYQTEENFNNLEQTEEQFFGSVNTEEYNFDVVEG

SEQ ID NO: 5167 - protein, 679 aa, Enterococcus faecalis
QKIGEKDYREQELEVYQNLSELLIERLTEDELYYYQAYQFLKNIPHERQDVLSSQNLDNLMATKIKPLFGGGLHLNCDYGESYISYLPMGDVGVFLDGNHFLEVVQKMPFPVEVKIQATFAESKGQLALSGRSSRARTRTKNIMQEAHLAGSKQKRKIVEGQLSLDDLDQKIDDDVDIIDWKAVIVVSGSTKKQMRARKKYLINRFDSLDIPLIKATFDNPYLFQSTLFGNFIRMQTSRWQHTSTIESFAELNFFTSLHAGTKLGFYLGRVDTTLEEKEDRKSIISSSKNLIFMNMLLANKQNVDGKKTNNPHWALTGDTGNGKSVTAKTLFMQMALLKDRVLYIDPKKEMRKQFMYTINDPEYQKKYPLDVDFVKSFNFVTLDVRDTKNHGVLDPIVLFDETEAIATTKAMLTNIYEGTWNLKQKTEINEAIAKVVLERKEGKKVGFWHVIERLAESEISDVKDMGRFILSTVKGSVLELAFSHGDVEGLSFDKKVTILEIEDLDLPTDKNENLDENKRLSVTLMFALGTFCSKFGSRNPKEETVTFFDESWIFQSSPEGKAILKSMKRIGRSFNNFLVLITQSTNDLDDSEDGTGFGTVICFDEVQNREGVLKYLNLPVNEINMKWVSNMVQGQCLMKDMFGQINRIVVHVIFEEWLELFKTVDDTEASKMENRFVA

SEQ ID NO: 5168 - protein, 184 aa, Enterococcus faecalis
NKINKKGKNMQLEYPLTNHMKGNIVLTQEKTAIAYYRVRSETVMLTDVEKKLKTKRKVSRALNRLKANDGFEINLLPVNADIRRKMGAMRSLIDSNNYEVGVDKLMKTAMVLEQEMGMVYEYTWVIGVPLIKKDLAVDLKETVTNSISNVSEKFVKGLGFDVELAEDWGKRLSRARIRSLPKSI

SEQ ID NO: 5169 - protein, 83 aa, Enterococcus faecalis
LLNNNWKEGKCMKKKVFLALTIFAMVTPFIFSSEASAREAEFGSSCPGGFYFKKGGWSTGGKNMSGGYCVPLGNMGNMNNKIW

SEQ ID NO: 5170 - protein, 108 aa, Enterococcus faecalis
QNLVIKMRKENVIKSFLYILTPIIIGTIISLFTNAPIFLIAGIIYIILLLFLLPTLDFGITDFNAKQINPSYRPERKINKNESIVTVLLLVIGIIVCAVMLYLKYKNS

SEQ ID NO: 5171 - protein, 134 aa, Enterococcus faecalis
DVGEYMKYYDYSRGLKAPYSMQVIKSPKGQVVWVFAQPVSLSYLLILFLGIVLTGLFWKEVPLPQILGINLNLLIMVLVPNKVARWYSEKEFEGKTGFGFLKDGFVYVKNYVLDSRPIVAFERVKEIEEFSFKR

SEQ ID NO: 5172 - protein, 75 aa, Enterococcus faecalis
LMNTGNLSNFLSTSFITIMAAGVIILILKHWKGAEWAKIGSVIVIALILQDFATNQGKNIFAVVKWFLSLVGIKM

SEQ ID NO: 5173 - protein, 371 aa, Enterococcus faecalis
KTTSGFYKKVRGEYENMGKEYHVAVVGATGAVGTRMIELLAETSLPIASVRLLASKRSAGQEIQFKGQPLIVEELVPESFEGIDLALFSAGGSISEKFAPEAVKRGAVVVDNTSHFRMAKDVPLVVPEVNPEALKNHQGIIANPNCSTIQMMVALEPIRQAFGLERIIVSTYQAVSGAGIRAINELKEQAEDFLEGKPVSEWSAEILPAGSDEKHYPIAFNALPQIDVFSEAGYTYEEWKMMNETKKIMGDNKLKVVATCVRIPVISGHSESVYIEVKQADASVSAIQELMAQAPGVILQDEPSEQLYPQALNSVNQKETFVGRIRQDVDVKNGFHLWIVSDNLLKGAAWNSVQIAETLHEMNLLRVPEND

SEQ ID NO: 5174 - protein, 301 aa, Enterococcus faecalis
KVCIVYSGGNMMDLTNATIITAMVTPFQESGEIDFDKLPQLVDYLLANHTEGVILAGTTGESPTLTHEEELQLFQRIIELIDGRIPIICGVGTNDTRDSVAFVKELATIAGIDAVLAVVPYYNKPNQEGMYQHFKTIAEASELPIILYNVPGRTAACLEVETTLRLAQLEKIVAIKECAGLDAITELIERAPKDFLVYTGEDGLAFATKALGGQGVISVASHVFGSSMYEMYQALEQGNLPEAAKIQRQLLPKMNALFSVPSPAPVKAALNHLGIPVGNLRLPLVACTPEEEQRIIRTLEI

SEQ ID NO: 5175 - protein, 572 aa, Enterococcus faecalis
RTCNHREVKRVSTIKIVPLGGVRENGKNMYVAEVEDEIFVLDCGLQYPENELLGIDVVIPDFTYLEENSERIAGVFLTHGHADAIGALPYLLSKIQVPVFGTELTIELAKLSVNSHAETKKFKDFHVIDPHTEIDFGQATVSFFKTTHTIPDSIGVSIKTKEGNIVYTGDFKFDQSAIEMYQTDYGRLAEIGKEGVLALLSDSSNAENPAQVASEAQIADEVFDTIRYWEGRIIVACVASNLQRVQQVLNAADRSGRKVVLTGQDFERIIRTAMKLEKLQLPSEDLLVKPKEMKKYAPEQLLILETGRMGEPIKSLQKMANNTHGVVRIEEGDLVYITTTPTTAMETTVAKTEDIVYRAGATVKQISDNLRVSGHANPNDLQLMLNLMKPKYFIPVQGEYRQLAAHADLAHEIGMPYKDIFITGRGDILEYTKGRMSVAGSTTAENIMIDGIGVGDIGNIVLRDRRILSEDGIFVAVVTINRREKRIVSPAKITSRGFVYVKTSKDLMKESSNIVTEIVEKHLESDDFEWSKLKQEIRENLSRYLFEQTKRRPVILPVIMEATQRKRPKNNA

SEQ ID NO: 5176 - protein, 466 aa, Enterococcus faecalis
IKEAILVEEIVLFHTNDLHSHFENWPKIRRLVKAKRSLYQKEGKTVVTIDLGDFSDRCHPLTEATDGRANVAIMNTLAYDLVTIGNNEGIGNSKKQLEHLYDQATFEVVLANLEEPKTQTLPDFCQAYKIMTTKEGTKLGFIGLTAPFPLTYNPNGWTIKQVEAVLPQLITEVAPQCDVLILLSHLGIDTDFMIAANYPEIQVILGSHTHHLFKDGEKINHVQLAAAGKYGQYIGEVHLFVDADTKQVTSYAKTIETASLEEQATDAKEIAGYLTEGHRLLQAQQIAQIPETLSTDLRQPHAFITVALKALKEAGQTEAAVLNNGLFLADLPEGIINADQLHEALPHPMHLIKVTLKGSDMSRLIREMEKSRQFLRKFPIRGMGFRGKIFGELCYDGIRFEPNSQTVFWQGKPIQPEQKYTLTTVDHFQFVPFFPTIELVGEVEFLFPDVLRTVVANYLHGLHHGI

SEQ ID NO: 5177 - protein, 650 aa, Enterococcus faecalis
RIINLQGAFVQKQCANAQVSNRRGFLRMKRKKIKNQLLVLTSILVLLSLAVAPVVTLAAELPSSSLQTALSSETTITSEEKVTETTETTVATSTTSTSSSSSESSSSTDTTTESTSQSTTETTTTNTSSETKKEPTEPTVSSEITQPVEQSQLPQVPVTKQEPEEPIQVPEANNNFVEENQAVSLNPSLKVDEIASSNLKGYELPLLSSFGEKKRAVVVAEALRHVGKTKKEFNLTEQALTSSFLAQKIYQQLFKIDIGSTPQEQMTFGKVRSIEEAEPGDLIFWQTAEGKTLQNGVYLGQGKYLIAAAESDSKEKPEVIAQLENIYTAKQQPDSKEEKRLVVTNPFKEFILTEYGKEVLATYGASFEMQKSEQTTAFIKKIGETARELGEKYDVFASVMIAQAILESGSGESQLAKEPYYNLFGVKGSFQGNSVSFSTKEADQRGQLYTISAGFRDYGGYNDSLQDYVQLLRQGIDGNQDFYKPAWRSEAKNYLQATRFLTGKYATDKQYDNKLNSLIAVYNLTQFDLPKTVDGLIIQSKNKLSEAEHQQMHFPVYDGINYNRTGSYPVAQCTWYVYNRFKQLGTSVDEFMGNGSDLGRKGRALGYQVSSLPKAGRAISFQPGVAGADNQYGHVPFVEDVTSSFTKRGK

SEQ ID NO: 5178 - protein, 1799 aa, Enterococcus faecalis
RGHVSLRMLLGKKAQISILNDHLFRYHLDPTGKFEEYPTPNDPKHVAKITAKTMADYGTQAFEQTNVTDSGNQFILENNGLKIMFEKESALMKVLDKKKNQVILEETAPLSFKNDKATQTLKQSSQENYFGGGTQNGRFTHKGTAIQIVNTNNWVDGGVASPNPFYWSTAGYGVVRNTWKPGNYDFGSHDPQKTTTTHEGTDLDAFYFFSDSSAGILKDYYELTGKPALMPEYGFYEAHLNAYNRDYWVKVAEGTAGAVKFEDGNFYKEYQPGDLGNLNGTLESLNGEKENYQFSARAVIDRYKKNDMPLGWFLPNDGYGAGYGQTDSLDGDVQNLKEFTEYAQANGVEVGLWTQSNLHPADPKNPKKGERDIAKEVSVAGVKALKTDVAWVGYGYSFGLNGVEDAANVFVKETDGAVRPMIVSLDGWAGTQRHAGIWTGDQTGGQWEYIRFHIPTYIGTSLSGQPNVGSDMDGIFGGKNKEINIRDFQWKTFTPVQLNMDGWGSNPKTPFAFDQEATDLNRAYLKLKSMMMPYNYSIAKESVDGLPMVRAMALEFPNEGTAYTKDSQYQYMWGPNLLVAPIYNGNQDEAGNSIRDGIYLPDEKQVWVDLFTGEKYQGGRVLNGVKTPLWKVPVFVKDGSIIPMTNPNNNPKEIQRDQRSFLIYPNGTTSFNMYEDDGISTSYEAGQSATTKINSQGPKSNEKGDLTVTIEPTKGSYKDFVDERSTRLDLLASEAPESVTAMVGGTEVTLKQAANKEEFLAGTNLYYFDKEFQVNQYLSEASGEKLNQSALSVKLAKQSVTAKDVQITVKGFINKGTVDGGNTTVDDQLTIPANVAINEEKTTPSSLTLQWDQVTEATSYEVERDGTVFGNIQTNTATFDGFSFLSEHTFRVRAVGKNGVSEWSEPIKGKTQDDPYKETINQVKATSNLPEQPGAELKKLTDKDLSTGWHTNWSTGIANPSDGNFLSLKFDLGAEYQMDKIEYLPRDNAGNGNILQLQYRTSKDGANWTEFSEPINWKQDALTKTIETKDQAYRFVEMKVLKSVGNFGSGREMLFYKQPGTEGILHGDITNDGTIDENDAMSYRNYTGLESVDSDFNGYVEKGDLNKNGVIDAYDISYVLRQLDGGIEIPDVEEIAGGLSLAVVNENGKDTYLPGDTLTFILKGQDLKNINALSTKMSFDSSKFELVGQPATTNNTQQMENYSKYRKHSNDVENLYLVLSNQGNKQLLNGSMDLVTFKVKVKETTRVKRATTVEQPLQFDMSQGLLVGQGFQQATLSDFSVTVKPTELVDKELLQALITLNQARVEKEYTPETWAIFKPILDEAVAVLANEQATQTDVSAAAENLEKAASQLEKMPDVANKADLEKAIQEGLAKKPSDGQEFTEETKKVLEESLAAAQKVFAQEKVTQEEIDQATKTLREAIAQLKEQPVAVDKETLKEQIAQARGRKPEEGYQFTKETEKQLQEAIQAAEAIVAKETATKEEVSEALNALETAMAQLKEVPLVNKDQLQEVVKRAQQVTPSEGHQFTASSLQELQKALLAAKNTLKNPAANQKMIDEAVAELTSAIDGLQEEVLVTDKKALEAMIAKAKAIKPSAGKEFTSESKARLTEAIDQAEGILADKNARQEQIDIAEKNVKTALDSLEEQVLQTDKTKLKELLQKAETLKPKAGKQFTKASQEALAEAIKQAKALVEDPNATQEAVDKCLSILSQAIEAMAEEPISSNSTGNNGNHSTVSGTGGVTSQGKGTATGGTTTKTTTSGTLPKANEVVSPIWSISGFLLIVSIGLGKLFFKNKKEQN

SEQ ID NO: 5179 - protein, 207 aa, Enterococcus faecalis
VLGKTPVSVELKIGGLPGDESVDDAIDPDLENPNTSFDLLFIPKEFTFETQAISGDLTAVPIRPSEGNTHTMRHFGMGDVRGALTGWHVTAEIPHMRNEAHSLLGIITFQLTGSYARYDKTLRRFFMTNTMYGLDFSEDPAAPDFPTNPIIIGNGATLMSNAGDRKGQGMWSGRMTDISLAIQTPVSQLFPGAYTGSIIWNLISGPV

SEQ ID NO: 5180 - protein, 375 aa, Enterococcus faecalis
YPFYNKQITIGKDGVMDTLYRSWQLSGWLYHDIFVIIVAIIFIVISGILVISLIRRRSTRRLVPYALILLVYLAVVHFAGLIFFGMFRSVTIEEKSATFYSEKTKGLTSIERMIIPNGRTNGISTSNSLFQVISVNSQTGERMWSKRLGWRDYLIGQTDQYVVLNNADNEAIYLLDTKTGKKQFSEADLVKKFPELKDYLSSDFVDYRFMDNRYLYIYGLNNRYYQLDLKNWQLKQDPTFKEVFQTQEAPKWTVDSNESQIGQELSSEERTTVQGKLEEQLIAPVLLGKKDEANYYVLSYKKRQSNQAIVGLYNWQKKTYEWQTPLLLTKENVPIEAFQVEDALFIKVPRYLYKINLNNGNQEYQFDYRWGQVIR

SEQ ID NO: 5181 - protein, 247 aa, Enterococcus faecalis
NIVTRSTLLGDGKMSEQYVYQHGTLGGLMESLMAGTAEIGTLLTQGDFGIGTLEGSNGEIILLDGTLYHANQTGEITILEGEELTPYAAVTRFQEDGAFPVSTETDENIKAQILEKISPNFFAAIKISGLFAKMHVRVAPKQEKPYPPFVEAARNQPEFTAENIQGTVVGFFTPKLFHGASAAGFHLHFISEDHQFGGHILDFGIKQGTVSWMETAELRQHFPVHDADYRNKEIDIAKALSAIEEAE

SEQ ID NO: 5182 - protein, 560 aa, Enterococcus faecalis
LVQILIGGITVSKKGSDIIVESLINHEVPYIFGIPGAKIDGVFDALVDKGPELILARHEQNAAFMAQGIGRLTGEPGLVIATSGPGASNLATGLVTATAEGDPVLALAGQVKRSDLSKLTHQSMNNAALFSPITKFSTEIQDPETLSENIANAYRIAKTAKKGATFLSIPQDVTDSPVTGEAIKPLSAPKLGHASAGTIAALAERIKQAKLPVLLLGMRASARKVTAAIRELVAITGLPVVETFQGAGIISKELEEHFFGRVGLFRNQPGDRLLKRSDLVIAIGYDPIEYEARNWNAEKDARVIVIDEVQMEIDQYMQPEEELIGDMSKNILKLSEAFSEPILTEDAQDYLETLQEKLTIKEVKTSTIENRLHPLEIVQTLQEKTTNEMTVTVDVGSHYIWMARHFRSYEPRHLLFSNGMQTLGVALPWAISAALVRPNTQIISVSGDGGFLFSAQELETAVRLKQNIVHIIWNDGSYDMVKFQEEMKYNRSSGVDFGPVDFVKYAEAFGAKGVRVHSQAEFAAALEEGMQTEGPVIIDVPVDYSDNQELGKTLLPDQLY

SEQ ID NO: 5183 - protein, 159 aa, Enterococcus faecalis
PIRKKSQPVINYWRKNMSKGKKIFAIIFGIILVLFLAVVGMGAKLYWDVSKSMDKTYETVERSKKSQVNLNNKEPFSVLLLGIDTGDDGRVEQGRSDTTIVATVNPRDKQTTLVSLARDTYVDIPGQGKQDKLNHAYAFGGASLAMDTVENYLNSVHQG

SEQ ID NO: 5184 - protein, 178 aa, Enterococcus faecalis
  MISC_FEATURE (141)..(141): Amino acid 141 is Xaa wherein Xaa = any amino acid.
ETNCHATVKCAEGGLDPLKTMLVVMSNAENAGGLVLSASPMAKKVLGVSNVTRKNQVPAHPDLYVVPPRMNLYMKKNQEINNLYKKFVADEDHSVFSVDESFLDVTASLSYFHCETAYKMARIIQRVVYNHVGIYVTVGIXDNPLLAKLALDNGAKHSPDFIAEWRYDRVPDTVWQLP

SEQ ID NO: 5185 - protein, 107 aa, Enterococcus faecalis
CQPVVKNGLVFRNSAEMVENSPEAYEKLLLDALNGDGTNFSHWEEVAQSWHIVDVIRKAWDQTQPDFPNYKAGSMGPKAAFELLEKDGFEWIWQPDNWYRERGKLND

SEQ ID NO: 5186 - protein, 153 aa, Enterococcus faecalis
ASFLFMKSLQTQKELMDTWTAFMDFRDNVLKALEEARNSKLIGKSLEAKLTVYPKQQVREMLKALDADIAQLLIVSPDYFEVMAADEQVPDNAMVFDDVAITVEKADGETCDRCRQVRKDVGVDEKLPHLCGRCAKIVEDFYPEAVAEGFEEK

SEQ ID NO: 5187 - protein, 126 aa, Enterococcus faecalis
TFRKKDPFLILLFLGFSFLFTFHTMINSFLAQIFENIHGGSKEVGIALMIAALCELPGMIFFEQLVKKEIQQILAVCCQYFIYCQRIHDATGQFDPDDGNDASPTSLQFRFVYSSFGLFVQSISGG

SEQ ID NO: 5188 - protein, 138 aa, Enterococcus faecalis
SFLNSLSKKKSSKFWLSVASISFTVRGFMMLLASSILMMEMTHLLQAFSFALFIPASAYLFNQFLADDDRVFGQTMIIIATTLGGVIGNVLGGSLLQHFGVWEMLIFGTGFAVLGALLTILGIRKIPKLSEDSGDITK

SEQ ID NO: 5189 - protein, 191 aa, Enterococcus faecalis
LGGCKMKKEDRRVLKTEKALAEALSKLLVDKKIQDITIRELTETADLHRSTFYTHYTDIYDLYEKLENSFFQDLDEIISYDTTHSYEDLYAHLIDYVYTNTFVYKLFVINHGDIQFQKRLNNLIEENYLKIWLQEDKKTVITEEMRYFTIYHIQGCLSVLNHWVESNFAYSKKKMLTFLRLLNDNIEPIMP

SEQ ID NO: 5190 - protein, 83 aa, Enterococcus faecalis
VMELAFKQLEKKDYKKAIQFAIKGMHFDWYTKNKLLLNLYGRYFWYLELNRATQIIALYADDELAGVLLADIKGKSKKHHSFS

SEQ ID NO: 5191 - protein, 121 aa, Enterococcus faecalis
KLYVKLFDFLQNAFVKDSKGGYDDTNEELLSDYLKKHSPDGEIVFLAANPDLKIKGIGSKLLKEFERREQGKEVFLFTDSGCTYQFYERRGFERKKEKDIVMKILNKEVDLRCMLYSKIIQ

SEQ ID NO: 5192 - protein, 130 aa, Enterococcus faecalis
GENMPKYKEIALALKERIVEGKYQEGSKLPEQESLAREFKTSCVTIRKAIQLLIDEGLLYTRRGSGTFIRSNIRQDNENVTQVNNVFGTSSQENTNVTSKIIRFDVRFPTDYERRLSATYFRSPSCKSWV

SEQ ID NO: 5193 - protein, 75 aa, Enterococcus faecalis
SVLMSGFRQIMKGGFLQPTSDPLPANHGYKKIGILSGLGGEIFTYHFFIPQAASSYLEFVEQMREVEAALQTTFQ

SEQ ID NO: 5194 - protein, 344 aa, Enterococcus faecalis
IFRKFIFYFYFRDVKMMVKLYRGDYLLDKFLDMSLVQRISCGIIVGIIVGIFLPSWTFITILGTVFVSCLKAIAPLLVFFLTAASIAKHKVGNETYVKPILFLYLGGTFLSALVAVVVSSIFTIPITLQEQVSEKAPQNIGSVLSTMLTNVTQNPIQAIIESNYLGVLFWAVLLGLALRSHTETTKEVVDQVSVALSYVVQLIIAFAPIGILGLVYQSISTTGLSGLAEYLQLVLVLVGTMLFVALVVYPLLTFLFIKENPYPLIFFCLKESAVPAFFTRSSAANIPINMMLAERLKLTKESYAISITLERPSIWGRCCNDYRDDIDDGTNIRDRSVLCFKIDP

SEQ ID NO: 5195 - protein, 137 aa, Enterococcus faecalis
QRNPMRSRLRWSDHQYGGAAVTITVMTLTTVQTLGIEASFASKLILSLLAAIAACGASGVAGGSLLLIPLACSLFGISNEIAMQVVGIGFIIGVIQDSVETALNSSSDLLFTAIGELSARKRNGEAISLKDSLSESN

SEQ ID NO: 5196 - protein, 60 aa, Enterococcus faecalis
LLYLTLISPLFHLLLMHVYTISYSALLDNINWVHFFIVKKQKACSNGNLFLFSVPRAFDP

SEQ ID NO: 5197 - protein, 154 aa, Enterococcus faecalis
VLSKVIKDEYIQLDVQANNFEEAIRKALQPFLEADVVTEKYVETILKIYEETGPYIVITENIALPHATVESGAKDVAIGFMRLKTPVTSGHRTNDPVKYLFSLSAKNNQAHIELLSELANLLGNPDFLKFIKVVSSREEFKNYIEKAEGENKHE

SEQ ID NO: 5198 - protein, 122 aa, Enterococcus faecalis
NLSKSFHLEKNLKTILKKQKERINMNSHKALVACRAGVGSSLMLKIKVNEVVKENNFPLEVEHSSLDGVPGFQGDMIITLPDVANELIEKNLPQKIVGIANIVDKNEIKIKLEETFIELEKQ

SEQ ID NO: 5199 - protein, 87 aa, Enterococcus faecalis
KGRLKMDFIISFLSTPAVLLGLVAMIGLLAQKKSGTEVLTGTSKTIIGFLIFNAGGTIMTGALQNFNTLFQTGFLIKGVLLLKQRQH

SEQ ID NO: 5200 - protein, 160 aa, Enterococcus faecalis
CRWHDHDRGFAELQYVVPNRISYQGSASPEAATALAQTEFAFVTSSTLILGFIMNLVIARITPFKNIFFTTGHSLFFACVLSLILKAHNFSDVAAIIVGGLLLGFFSAALPQLCQPFMRKITGSDATAIGHFNMVGYALSGYIGKLFSKYKDRTTEDIIG

SEQ ID NO: 5201 - protein, 304 aa, Enterococcus faecalis
GVIMRDLTIGTPAKLIFLFTIPLLVGNIFQQFYNIVDMIIVGQTIGKEALAAVGATGSITFLIIGFAQGLTAGLSIITAQRFGAQDFRGVKKSFAVAIIISFTVTAILTVLSLVFLRPLLLLMQTPPDIIQQAQEFICVILGGMFASMAFNLLSNMIRALGDSRTPLFLLIFAVIINVILDLVFIINFHMGIAGAGYATVIAQISASLMCVIYIKRKIPLLQVSKSDFKIDKDTIFTHLNAGLPMAFQSSIIAIGAVVLQSALNSLGTDVVSAQAAAGRIDQFATQPMMSSVVRSLYLLNSLPI

SEQ ID NO: 5202 - protein, 60 aa, Enterococcus faecalis
NCWKIFPTSNGMVNKKINFAGVPIVRSLMITPQFFSEYLQITYYHSLIEPQIADLYKKYS

SEQ ID NO: 5203 - protein, 229 aa, Enterococcus faecalis
RKRGGRHMDVVLMRHGESEANFENYWTGWLDVSLTAKGQEQARKAGEKIKNAQIEFDAAFTSVLKRASLTCQIILEESDQLWIPTFKTWRLNERHYGALVGKNKDEMAREFGADQVKRWRRDYYEMPPLVEENHFDRRYAQLADQDIPHGENLQMTVQRVAPLWQDEIAPLLGSGKNVLITGHGNSLRALVKYLEDVPEDQMDTIDIPNAQPIHYRFDKNLQIVNKSIL

SEQ ID NO: 5204 - protein, 105 aa, Enterococcus faecalis
NYHKLWYTIERIGGIRIMKAILTVVGKDKVGIIAGVSQKLAELNINILDVSQTIMEDYFTMMMMLQMQPEADLEAIKQALSLVENTLSVKISIQNEEIFNAMHKL

SEQ ID NO: 5205 - protein, 312 aa, Enterococcus faecalis
  MISC_FEATURE (191)..(279): Amino acids 191, 212, 226, 250, 259 & 279 are Xaa wherein Xaa = any amino acid. 1               5
TIIRREMMETKQILETIRMVEEENLDIRTITMGISLLDCIDASTEKTCQNIYNKITSKAKNLVKVGDEIASEFGIPIINKRISVTPIAIVASASGGQDCVAFARVLDKAAKAVGINFIGGYSALVEKGYQGADLSLIQSIPEALAETEFVCSSVNIGSTRAGINMDAVKLMGETIKQTAEASDMGCAKLVXFANAVEDNPFMAGAFHGVGEXNCEINVGVSGPGVXKRALEKVKGESFDVVAETVKKKAXKITRMGQLXGQIASERLHVPFGIVDLSLXPTPAVGDNVPWILEKRAWETVGTHRYNGRTGFY

SEQ ID NO: 5206 - protein, 176 aa, Enterococcus faecalis
PILCGEEETTFLPKNPLNCVPTELHEQRGLIRGATHDPKAFVLREHAGNAGLFSNVYDLTKFVRMYLNRGSYHNHQFLKKETIDLLLVNQVPAADKPRSLGWDFKYDVATQRPLLFHTGYTGTFLLIDVQQQSALIFLSNRVHPEDHRNTYIEERDQLLATYLKEKSSVSDEMTSF

SEQ ID NO: 5207 - protein, 333 aa, Enterococcus faecalis
ERIQFGRSQSMQEPLFLQPVFQEKIWGGNRLHTLFGFDLPSDKIGEDWAISAHPHGVSTVLNGEFKGKKLDELWADHQELFGHAGGAVFPLLTKILDAEDDLSVQVHPDDAYGQKHEGELGKTECWYIIDAEPGAEIIYGHHAKTKEELAEMIEEGRWDNLLRKVPVKKGDFYYVPSGTIHAIGSGILILETQQSSDTTYRVYDYDRTDDQGKTRELHIQQSIDVTTVPAKDPDLSIQQENQGQSSIVTYVKTDFFNVYEWRVSGILKVKKQAPYTLATVIEGVGRLITEDAAKADVATFDLKKGDSFIFPTDIPSWRFEGDLTIIASEPGSR

SEQ ID NO: 5208 - protein, 194 aa, Enterococcus faecalis
DRKRFQKFKDGITMKKITPRIITIIAFSVALNYLGSTIALLLRLPIYLDSAGTIFTGALLGPLFGALTGILTSLLTGLTTDIFSLYYSPVQLCTGILAGLLLHQQLKVTKLPFKTLWLTIPGTVISSLITVCLFGGITSAGSSIIVQFLYGLGFNQLASVLLVQLITDYGDRLLSVIIVTAVIAALPKRSFITK

SEQ ID NO: 5209 - protein, 339 aa, Enterococcus faecalis
QELSFAVNEKGGLEKMQKVIIDCDPGIDDTLALLYALASPELDVQAITVVCGNVPVEIGVENVFKCLEKVNRLDIPVYQGAASPLKRPFVSAQDTHGMDGLGETYFPRTSKIQAQALSAADYLAQTFQQATDCSIIALGPLTNIALGLKKEPLLGRNLQRFVSMGGTFKSHGNCSPVAEFNYWCDPDAAAWVFEKLGAKIEMVGLDVTREIVFTPTILNYCQRLNPKMGNYLAEITQFYFDFHWKYERILGCVINDPLAVAYFIDPTLCQGFSSYGQIVPDGIAMGQSMIDQYHFQQQPANCHVLTTVDSQQFFVKFLSILLNVQIDEIERDFKNLRMG

SEQ ID NO: 5210 - protein, 89 aa, Enterococcus faecalis
NVLWFWEKKKNHNGMTFLGEGERPLGTVKQGKGNNGQDNGEGVVYKNVFGSYFHGPILARNKNLGIRLIRTALEKKYGEPIAIPETLYK

SEQ ID NO: 5211 - protein, 159 aa, Enterococcus faecalis
MVSKELVVCHLYGNLLNTYGDNGNLLMLKYLTEKMGVTFRSEIISIYEPFDPEKYDLVFVGGGQDFEQLIISEDIQNKKEALTSYIENDGVLLAICGGYQLLGHYYVGAQGEKIKGIGALDHYTLSQDNNRFIGDIEIYNEEFDETYYGFGKRKKIITA

SEQ ID NO: 5212 - protein, 465 aa, Enterococcus faecalis
NYRKIKDIEIWGTTNGDSKSFSNCCTEKFSQWVLQTFFKGGSSYPGKLALKIDPKILDTLAKDYEIVVVTGTNGKTLTTALTVNILRQEFDEVLTNPTGANMEQGIVSTFLNAKAKKGQKKFAVLEIDEASLSRVTKYIQPKLFVFTNIFRDQMDRYGEIYTTYRLIMEGAAAAPEATILCNGDSPIFNSKETVNPRKYYGFNHLPPKEQLAHYNTDGVLCPKCNHILHYKMITYANLGDYYCPNCGFKRPELDVQLTEMVRMDNTSADFVIDGEEYGIAVGGMYNVYNALAATAVAEYYQVAPDKIRAGLAYDEKVFGRQETIKVGDKECTLVLVKNPVGLNQVIDMMGLAPYSFSLVSLLNANYADGIDVSWIWDGNHEAFADMDIPKVIAGGDRHEDMALRLKVAGIPEEKLLEIADLEQVISEIKTLPTDHVYILATYTAVLQLRKSLTAQGYIQGGMNGV

SEQ ID NO: 5213 - protein, 60 aa, Enterococcus faecalis
NLTSVVDYMRETIHAIEHFTAGGGKGANQAVAANVQGAGQPYFHSGGGRREMMRWTMRLI

SEQ ID NO: 5214 - protein, 269 aa, Enterococcus faecalis
RSKPSSCSERSGRRTTLFSFGGRPPGNDALDYETDLMSQDEINLTGVTTLEIDGPRRAPRRGRSHPRAPPLCGKPRGKTLLLWGGPCPPSPPPSPNPSKFWPSPFCGPPPGDRHNQPAPGERAVGATSNPAPALEQVPEELLNVTDMIVPNETETEILTGIKITDEASMRKAAEALHQLGIEAVIITVGSKGAFYDVNGRSGIVPAFKVKAVDTTAAGDTFIGALSSILEKDFSNLEEAIRYGNKASSLTVQRFGAQPSIPYQHELADK

SEQ ID NO: 5215 - protein, 136 aa, Enterococcus faecalis
KGASDMKKTKVINSDISRVIAQMGHFDKLSIGDAGMPVPRTTEKIDLAVTNGVPSFMEVLNNVLEELAVQRIYLAEEIKTENPDMLAAIETRLPETPISFIPHTEMKQELNNCHAFIRTGEMTPYANILLESNVVF

SEQ ID NO: 5216 - protein, 302 aa, Enterococcus faecalis
TKRGEIEMNATALLIGLGPLLGWGLFPTIASKIGGRPVNQILGTSLGTLIFAAIFSMINGLAFPAGMDLFFSIISGVGWACAQIITFKCFTKIGSSRAMPVTTAFQLLGASLWGVFFLGNWPGATAKLLGAFALVLIMIGAKMTVWSETESADSAGIMKKAVLLLAVGEIGYWAYSAAPQATAIDGMHAFLPQAIGMVIVAVIYSAVVTIKGGEISPFIEAVSYKQIFSGFFFAFAALTYLISAQPDMNGLATGFILSQTSVVLATLTGIWFLGQKKTAKEMTVTIIGLVLILAAATITVMI

SEQ ID NO: 5217 - protein, 304 aa, Enterococcus faecalis
VCVLVIGGKVMELRVIHYFLAVVQEKTISGAAKQLHVSQPTLSKQLKELEEELGVTLFIRGNRQIQLTPEGEYLAKQGQDILSLANKTVTNLSQNEFINGEITIGGGETKAMSFLANALQQITSQHSADIHLHLYSGNADDVIERLDKGLLDFGLIIEPAPKQKYSYLTLPVVDTWGLITVKDHPLATKNVITAADLKEEPLFISRQAQVPSQLSDWLEASLDQFRIVGTYNLLYNASLMVEAGLGSALSIDGILETKQTNLRFIPLYPALTAKISLIWRKNTVLSTAAALFLEQIKKSIQRPE

SEQ ID NO: 5218 - protein, 213 aa, Enterococcus faecalis
VLDRGVVTYYDKFSKRRRLGMLTKNLQELIATGSIDKDEPLFQLIHQIQEENSRYLIELNQQAYTHNEVRNLLATIIQDKIDETVTILLPFYTDFGRNIHFGKNIFINRAAMFVDLGGIIIEDNVLIGPRVNLLSVNHPELPMKRRGVLLAPITIKKFAWLGAGVTVLPGITIGENAIVAANATVTKDVPANAIVAGTPAKIIRWIQEDKEEI

SEQ ID NO: 5219 - protein, 249 aa, Enterococcus faecalis
GGNIMKSLSEKVIVIMGASSGIGEATARLLARKGAKLVIAARRQERLIAIKKELPEATILVQQADVTKEEEVQRVIKLTMEKYGRIDVLFNNAGVMPTAPLIEAPKGEWRQMLDINIMGVLNGIAAVLPIMVEQKSGQIIATDSVAGHVVYPDSAVYCGTKFAVRAIMEGLRQEQRENNIKSTIISPGAVQTELYQTISNRVVAETLHLEQLSWGLKAEDIAQAVVFAIDTPDRMSISEMVVRPTTQTI

SEQ ID NO: 5220 - protein, 395 aa, Enterococcus faecalis
HLHTIGVVVDRRKTMTQINKYTKKDGTTAYMFNAYVGRHPKTGKNVYRKRQGFKTKKQAQIALAKILEDIEENGLDNKPSVLTFKQLYEKWLAQQRLTIKPSSIAVNKRFAEKHILPYLGDCKLDEITVIQCQDLVNKWFNQGHKQYSFYRKLTAQIMRYGESMELMNTNPMRKTILPKWKEEETKLEYYTKQELNHFFDCLKQYGNFKQLAFFRLLAFTGCRKSEVLALQWKDLDITNKSVYIGKTVAQDEFYNILTQTPKTASSTRSISLDNETLQIMAKWRTIQRSDYFQMGFNTSSEEQYIFTNNHNKLLSPNVVNIWLNCLIKKYDLPSITPHHFRHTHASLLLQSGVPIKEVAERLGHTSTAITDRIYSHVMPEEKEKTADKFAQFVGF

SEQ ID NO: 5221 - protein, 86 aa, Enterococcus faecalis
DQPIDRYVNIIIKQVNNDLFIEVSNNYNSEEIFTRKHRKNKGLGMKNIDDLLQQLGGIQRHWTKERRYFVTIVIFNVYKGNKCGDN

SEQ ID NO: 5222 - protein, 247 aa, Enterococcus faecalis
KSIMMNKRENMISDSKLNVYRYELDKIKNVWFKVFLITLVIQMLFFMFFSFVGIFDESADTISSFQGIIALSNTVSMCGISIYGAVLLRKELVRFYVGNHRNRTFLFPIDRKELLVKKTSSFYVIILSSFGSALLISFVTEVLLNLILKFHSSNLFFEIYLGLITIVTSCSLLFVILILSEIISIWKQSEIASIITSVVLMLIYSNFSAMGLMNFPTITFLFSTIMGLMLVWLFLKFSDKLCDMEVY

SEQ ID NO: 5223 - protein, 264 aa, Enterococcus faecalis
YYCSLFLVRVNYITFTYFIVKKGLNCKMQTININNLYKKVSDTFNLKVDQLDLEVGKIYGLVGPNGAGKTTLMKCLCSLLRPDSGILKIDNRQVEIADPKILLQVGTNFVNSDSLNGFMLEDIYNDHAFYYKLKNLLMIETLLMDVGLNVNKKRKFNTMSLGMKQRFLLGLATAHNPSLVLLDEPFNGLDPDGVELFIENVKTLSENRVLIISSHILRDMETFLDDVIFIEKGNVQEPKSMVEIREEYREGLKEYYDEQKRKHD

SEQ ID NO: 5224 - protein, 252 aa, Enterococcus faecalis
MKMIKNYRRKSMIKELFALVGWSLLRHKYLLPVFTLTQVFLSLAIVYGLALLIPDVNNQTAIYLSSGATTLGIIAVGCVLAAQIVSTAKQEGIVDYQRTLPVSRLNILISDFIIWGMASLPGVFMSFLAAYLRFDVQIRFSMKALAILSLIQLCMISIGFALAYWLTPNVVGLATQIIMIGGLLFSPITYPTDRLPSALVNFFEFLPFVPSSNLIRSLFYEQNTVNVSNIIVVCFWFVLTTLLSLISLSRRD

SEQ ID NO: 5225 - protein, 104 aa, Enterococcus faecalis
IMERFLEDKNLKKQSIKINDRNYMTVNFLNLSDLKSVIVPSAIQTNINDEELMIEMELENSQVLEAVDWVMKLVIERKVQNYKVSPKSLNETYGELIDENDKKL

SEQ ID NO: 5226 - protein, 237 aa, Enterococcus faecalis
FGYGSNLLSINLIKSKYRRFALNQQLELHSLSKKYKKSESYANDNINLRFNKGEITAIAGHNGAGKTTMLNQIIGITKSTKGSITFNGLSFARDSKIAREYVSMMPQLHAPLAGITMAQSVESIIRIRGGSQKIAEEECIKILKELKIDGWKDIPGQKLSGGLRRLTSFAMAVVYPSPIIVLDEPTNDVDPIRRQKIWRYLKKLSNKGHIIIVVTHNILEVEKYADRYILMNHGKVP

SEQ ID NO: 5227 - protein, 271 aa, Enterococcus faecalis
RRCLPMGNISILSREEIGRDYTEARTLKRKLNNGDWVYVSEVLNELVENKIMIKKADQRDDYKPLFVEPKNILFKSSSFLIDVNGIVAFTISIFLFVIKGSPFGSAVNVLFTNPLKFLLIAILVSIVSTTFHEFMHIIFSRNSRKINLNIVKAVATIPMTHVWTWSRFGRITAITSGMSSDAIFLLVFLIMNNKSVGVNSIAASILITRILWQFIIIQKTDINILISFVVDNPFYFEEVAIMKLIIIKVISISVLVMIIWLWFQPVINQFN

SEQ ID NO: 5228 - protein, 69 aa, Enterococcus faecalis
KVVDTIETRIAIRRNFKGFVNKTFTALPKGDPLITNKNMLIVNATIPLTSIRKEELLNKIFLGSTNSGL

SEQ ID NO: 5229 - protein, 381 aa, Enterococcus faecalis
GVKKMKYKYPRIKPIYPLYQLNKERFRVGAQLGITIEFDDDEGQFWTLSNLLDGVRSFDEVVTEMKRKYPELTVKDIEEGIDFLNDEGLIEETFPGRMIEDRYLANVNYFSRYCKADDDRFEIQEKINNLKILLLGLGGGGSNILTLLAGLGPKMIRMVDYDRVEASNLGRQLLYREADIGEKKTVVAKRAINEMNSNINVETVDKKIIDVNDVVELTEGIDIIVCAIDEPPFLIHRIVNEAIVKVGLPCVFGASQVSRGRVYTVIPQKTGCFDCMNLNFSKNDPKFVEQFVGFRNIQFAPPSIAYGPGIFQLTASIVDELIRVVTRYAEPKSLGTQYEINYEDGNSFTHKTWPRFESECPTCGKGDVSQWEIFQYYQEKK

SEQ ID NO: 5230 - protein, 172 aa, Enterococcus faecalis
RQKHTQEDFYMTQVHFTLKSEEIQSIIEYSVKDDVSKNILTTVFNQLMENQRTEYIQAKEYERTENRQSQRNGYYERSFTTRVGTLELKVPRTRDGHFSPTVFERYQRNEKALMASMLEMYVSGVSTRKVSKIVEELCGKSVSKSFVSSLTEQLEPMVNEWQNRLLSAKNYP

SEQ ID NO: 5231 - protein, 68 aa, Enterococcus faecalis
GGILMGNSKIITKLNEILSPIAEKIGNQRHLKAISSGMMFGLPFIVIGSFFLIFANPPINIDQSLTTG

SEQ ID NO: 5232 - protein, 209 aa, Enterococcus faecalis
EYYNMTEKKFIQDPWAKMTTRNGLAGDEVISALQKSIRRGKEKDACEFAYEMYITSPQFEEKLWRRLLAISVEDIGMGNPIAALMINNLNMMRKEFQYNESDRAMFFFHAIRYLCGSEKDRSSDLLKNIVIKSFAMGYVPEIPDIALDKHTTRGQEMGRGSEHFLHEASKVIPQAKVENDYKEQYEEIIKKYDPNHVVPSTFVFNPWQV

SEQ ID NO: 5233 - protein, 262 aa, Enterococcus faecalis
TVSRSHLCPRILNKFFFCHVIILLTKEFEVDLMDTEMLIDKYQLNDSEAAVLRFMDKNRDCLKSLGIREVAKASYVSTTAIINMAKKIGYSGYSELVFAYGNKHSSISFPENFSNEEKDEFIRLLSRYREKRIMVLGSGFSQNIANHFSEMLNLYGFRATANSHLEFLRENVEKDVLIFIVSNSGDTLRLAELVKLAKNHHIDLIAFVGEKKSKIGQLATLTISTETYNPQVVSEYQPNLFFGTALNQFELLLSEALKSIFI

SEQ ID NO: 5234 - protein, 192 aa, Enterococcus faecalis
LESGCYFMNDLEQLVSYLEGHFSNEQQFSELTETAQSEFPFAIHKSHIFNDRVLNLPENFKGIFLLEESYYTLNGKERFKSDIFLFEVNSSSNVKLSSITVPKNYANKKYEEIESIPFSEMTISEKFVPIVYKKENETFIGQSESKFTEKNHFILKQTISEKKLIIKEEIMRGNKRIFVFDKPIEYVRVKEN

SEQ ID NO: 5235 - protein, 273 aa, Enterococcus faecalis
RKSKRSEESMQIELSIINQENEVVMCSSGVDEAVLATKKYAFQAGDKFKVVTAEKQLVYVQLDNALGSSLVYLSKGEWVYEIPTTEKLREAYPPAAFLDEKHYFFVRKAFAEEQTSYRNWALNPHDQKDVANVYPHAYANVETRNDATFFARNAIDGILANRDHGSYPYQSWGINQQKDAEITIDFGREVELDKLGLVLRADFPHDSYWKQVTIAFSDGSEEIFTTSDAIATQYFTFSPRTVTTATLKQLIKAEDESPFPALTQIELFGYQKL

SEQ ID NO: 5236 - protein, 76 aa, Enterococcus faecalis
QMLTEDSACEYGQFNIQCNGVGRGYIATPQTAPVRELQEDGERHPFDQFIVGRTPAARWGDPVDLAGPSVFLASQA

SEQ ID NO: 5237 - protein, 167 aa, Enterococcus faecalis
MDFNMDMFRLDGKVALITGAVYGIGFEIAKSLAAAGATIVFNNLTQESVDEGSANYKAEGIEAKGYVCDVTDEKAVQAMVKQIKEEVGSIDILATNAGIIRRIPMTDMSATDFRQVIDVDLNAPFIMSKAVIPEMIEKGGGKITNICSMMSELGRETPSAYAAAKGA

SEQ ID NO: 5238 - protein, 284 aa, Enterococcus faecalis
KREINMQNMDTRYTHSPKDISHYSTEELRKEFLVEKVFVPNEVSLTYTHNDRMIFGGVTPTTESLEIILNKELGVDYFLERRELGVINIGGPGFIEIDGRKEAMKKQDGYYVGKETRQVIFSSEDAADPAKFYISSAPAHHKYPNVKISIDEIKPMETGEALTLNERKIYQYIHPNICESCQLQMGYTILEPGSSWNTMPCHTHERRMEAYVYFDMEEDTKIFHMMGDPAETKHLVMGNEQAVISPSWSIHSGVGTSNYSFIWAMCGENITYTDMDMVPMDELK

SEQ ID NO: 5239 - protein, 247 aa, Enterococcus faecalis
ELITWKRGSVNVLASVTYDRAGSSFAEVTEFPWSYEKLFSGIELFHISGITAALSVQWCQWTVELVKAAKKFGVLVSFDINYRGKLWSQAAAGKALKEILPYVDYCSAGELDARYLLEIPEDRMNSGFVYYYQQMQQQFPNIKCFYSTKRIVSSASNNQLVGTLWLENTYYESEVHKINPIVDRVGGGDAFAAGILHGLISDFDGQRTVEFATAASALKHTVHGDCNQFSEIEIEQFLTAGSGRIVR

SEQ ID NO: 5240 - protein, 120 aa, Enterococcus faecalis
MTIAKDMMVNDGIRARELRLIGQDGEQLGVKTKAEALQIAESANLDLVLVAPGAKPPVARIMDYGKFRFEQQKKEREARKKQKVINVKEVRLSPTIDVNDFNTKLRNARKFLEKGDTVKV

SEQ ID NO: 5241 - protein, 360 aa, Enterococcus faecalis
GGYEMKALKAYKYRLYPTSKQEEFIQKTFSCVRLVYNLMLQDRIDIYKEMRKNPQQTFKMPTPAKYKKQYPVLREVDSLALANAQVYLDRAFKNFYREKGMGFPKKKKKETVHSYTTNNQHGTVKILDNRYLKVPKLKSLIKMKVHRQPLGEIKSVTISMSASHNYYVSILCEAPIETKTKQQKMVGICSSREKFALLSNGESFEKSYCSKHLKQKLRQEERKLNKRKMIALEKGVDLSQAKNYQKQKIKVAKIREKIANQRTDILNKITTELVSSYDVICIEKAHHSNERPPKHDRSELAWSLFLAKLLYKAQWYGKELICIESEEIETELSFSESTENSEYLRSQKILERGLSKRETL

SEQ ID NO: 5242 - protein, 319 aa, Enterococcus faecalis
LMAEEKKVLLEVTGLKQYFNVGRKDEVKAIDDISFHIYEGETFGLVGESGSGKSTTGRSVIRLYDPTAGEILFDGKDISKIKSKADMQAFRRDVQMIFQDPYASLNPRMKVNDIIAEGIDVNGLAKTPKEREEKVNELLKTVGLNPSHSTRYPHEFSGGQRQRIGIARALAVNPRFIICDEPISALDVSIQAQVVNLLQDLQKEQGLTYLFIAHDLSMVKHISDRIGVMHSGKLLEMGTSDDVYNFGVHPYTESLLSAIPLPDPDYERTRKRIVYQPAAADGKDRELREILNGHYVYCAEDEVAMYREKIEEKKRKAGL

SEQ ID NO: 5243 - protein, 352 aa, Enterococcus faecalis
MTMEKVLEVKDLRISFDTFAGKVNAIRGVSFDLYKGETLAIVGESGSGKSVTTRSIMRLLSSNANIDNGEILFKGQDIVHKTEKQMQAIRGKEIAMIFQDPMTSLDPTMPIGKQVAESLIKHNKVSKKEGLAQALELLKLVGIPNAEKRLKNYPHQFSGGQRQRIVIAIALICYPEVLIADEPTTALDVTIQAQILELLKDLQEKISTSIIFITHDLGVVANVADRVAVMYGGRLVEVGTAEEIFYNPQHPYTWGLLGSMPTMEGTEDKLYAIPGSPPDLLDPPTGDAFYPRNEFALKIDTEKEPPYFEVSPTHKAATWLLAPQAPKVTPPAEIVRRWAIYAERQKNPGGSN

SEQ ID NO: 5244 - protein, 362 aa, Enterococcus faecalis
SKNSRIRRCKRLMETVNKNNLPQAIKDIPADEFQPLNTSTLKERERIATPSLSFLQDSWRRLKKNKAAVISMSFLAVIIFISIITIWVSPHNPTKQNVSYINLPPRIPGLESVNGLNGKTTVAGQLVDKYAQANVPDNVNFYLGTDGLGRDVLSRLFMGTRISLLIAFIAAILDITIGVTYGLISGLVGGRVDTVMQRILEVLSGIPNLVVMILMLTVFDPGIVSIVLAMVITNWISMARIVRAQTMKLKDQEFVMAAETLGESRWKIAIKHILPNISSVIIVQMMFSIPSAIFFEAFLSFIGLGLRPPTASLGTLLNEGYKTFRFLPYLMWIPAATLSVIMICFNLLADGLRDAFDPKMKE

SEQ ID NO: 5245 - protein, 294 aa, Enterococcus faecalis
WLIATITFFLMQLLPGTPYTNQEKLSPETIAMLNKQSGLDKPVIVQYGIYLKNLVTGDFGISFQFKNQPVAKLLAGRIGPSLQLGGQAIIFGTLVGILLGIIAAMRQNTWVDTLATLLAILGRSIPNFVFAVLLQYIFAMKLRILPIAMWNGFAYTILPTIALAMSPMADSARFIRTEMVEVLHSDYVELAKAKGLSRWQVAFRHGLRNSLIPLITLLGPLAVGLMTGSLVVENIFAIPGIGEQFVKSIMTNDYPTIMAVTILYSTMLVVVILIVDLLYGLIDPRIRVSGGAKG

SEQ ID NO: 5246 - protein, 69 aa, Enterococcus faecalis
VKKNADTGNNGCNNWPFKSFHVFTLSIIVVYLVITLTKITEEVKKISEVSLLNSFGKYFLKRIFFMIIT

SEQ ID NO: 5247 - protein, 119 aa, Enterococcus faecalis
GEHMKTFKWPIITAVISSIGIFLYLLISKEHITTSSLSDTLFIVSILFLIIGIALWIISWGFFDNFQRSMRNAFRFKKKNEPKEFIPLSVIGDAHRSLWLITGGILLILSIGFLLFYLV

SEQ ID NO: 5248 - protein, 234 aa, Enterococcus faecalis
  MISC_FEATURE (219)..(219): Amino acid 219 is Xaa wherein Xaa = any amino acid.
PAFVSQKEASTQYMELNQRDEKSPFRNANLRKAISYSIDRKALVESILGDGSIEPNCLVPADMAKDPSGGKDFAKEAGSQIEYDTKKAKEYWEKAKKELGISTLTMDILSSDADSSKKTVEFVQGSIQDALDGVKVTVSPVPFSVRLDRSNKGDFDAVIGGWSADYADPSSFLDLFASDNSYNRGRYNNAEFDKFVKAASSADATDPEKRWDDMLNAEXTIMGDMGVGTLFQKS

SEQ ID NO: 5249 - protein, 114 aa, Enterococcus faecalis
RGRRGKCKMNEGQEMEEQFALLLETLKNQQMNEFRELFLALHIYEQGQFYQSLDEKDRQHLYNYLSPKELADMFDVIEEDNENMKDYLAEMRPSYAADMLAEMYTDTAVDLLNN

SEQ ID NO: 5250 - protein, 157 aa, Enterococcus faecalis
YYLRNTGFAHALIDQELREKKVTKIYYALVGGAIEQLSEHQLIEKPIGRDLSSLLKRQVIETGQFASTEYWLAKRGAQAAAVRIQLHTGRTHQIRVHFEAIGCSLLGDEMYHGKMDQGIERQALHCMELIFTHPFTKETVHLISPLAEDMKSVDDTL

SEQ ID NO: 5251 - protein, 75 aa, Enterococcus faecalis
TMEFQWTYDKETTQQVKYFLKEQGVSKGLLAKVKFQGGKIQVNGTVQNAIYPLQTGDVVKMTIPDEAEHETLLNR

SEQ ID NO: 5252 - protein, 269 aa, Enterococcus faecalis
RSLLMKVAIVHNSEEKSKQVTKQLTTLLEQNQIQIDNRQPELVISVGGDGTLLSAFHRFNHLLNEVSFLGVHTGHLGFYTDWRDYELKELVESLCIHREKSTSYPLLDVRIRFRDGKPDKHFLALNESTIKRGNRTMVGDVFIKDELFERFRGDGLSISTPTGSTAYNKSIGGAVLHPSINAFQLTEIASLNNRVFRTLGSPIVIAHTEWLEIKLQESDDYFVTVDQLDIYQENIASVCYRIADERIHFASYRHMHFWHRVKDAFIGED

SEQ ID NO: 5253 - protein, 234 aa, Enterococcus faecalis
MKFKEIEGSTMEREWELFLAPYEQAVSELKVKLRGIRKQFREQDKHIPIEFVTGRVKPVDSILTKTAIRHIPLNRIEEEMQDIAGLRIMCQFVEDIYQVVALLRNRKDLKIVEERDYIENKKESGYRSYHVVVEYPVQLVTGEKIILAEIQIRTLSMNFWATIEHSLNYKYQGVFPEEMKERLQRAAEAAYLLDEEMSSIREEIQEAQHYFSHGRGLLENEYYKQIKNETPENQ

SEQ ID NO: 5254 - protein, 222 aa, Enterococcus faecalis
KNFSQRRPLFLTETYIICENWSDLRKRENPMSEHLEIEFKTLVSPQDFKRLIDHFAIQKTDFFTQTNHYFDTDDFQLKAQRMGLRIRVLADRGELTLKVPAPEGLLEINDPLSLETANHFIKRNHLPTEGAVAKKLQELGIEIASIHLIGSLKTARAEKQIPQGLLALDESWYNQQHDFELELEVTEAESGKQAFQTLMADLNIPITLAPNKIQRMMRTTAP

SEQ ID NO: 5255 - protein, 219 aa, Enterococcus faecalis
MVEIYLFVNPLGGVCLEIEKEIIQLSVNDKKKIQLRFIPLLNMKTINEFLSRQHIPINDIKRRNRIFEDLYSAALDYKAAQLQGRKKGRQLLIGLQKAVAEDGLAYSPELSEELLLAAGGDIDMYRKDRQSDFVKESFQTDQKVAREMGIKQHPTAVVYNYTCENDFGILVENFENMDEIKQLCRVHPHNEPLLNQGDATFEFKRRSNYHFPNGHLHLL

SEQ ID NO: 5256 - protein, 604 aa, Enterococcus faecalis
TMSEIKQLPTRDEVPTPLTWDLTKIFKDDAAFDVAYNQLIEELNQAESFKGTLGDGAEAFLAALEYVLDVYRKVETLYVYSHLKNDQDTTNTAYQALYARASSLYAQVSEAVSWFDPEVLTLSDEQIWGYFEEQPKLAVYRHYIQNILDERPHVLSMEQEALLAGASEIFGASSNTFSILNNADLEFPTVQNAEGETIQLSHGVYGQLMESVDPSVREAAFKGLYKVYKQFRNTLASTLGAHVKTHNYKAKIRNYDSARAASLASNHIPESVHETLVAVVNKHLPLLHRYVKLRKKLLNVEELHMYDLYAPLLGEAPIRYSYEEAKEKAIEALKPLGEDYLSIVKEAFSSRWIDVIENQGKRSGAYSSGAYDTAPYILMNWHDSLDQLFTLVHEMGHSVHSYYTRNNQPYVYGDYSIFLAEIASTTNENILTEYLLQTETDPKVRAYVLNHYLDGFKGTIFRQTQFAEFEHFIHTEDAKGTPLTSEYLSEYYGELNAKYYGPEVVRDEEISYEWARIPHFYYNYYVYQYATGFSAASALSKHILAGEEGALENYLNYLKAGSSDFPIEVMKKAGVDMTQAAYIEDAMKVFEERLTELEALVEKL

SEQ ID NO: 5257 - protein, 65 aa, Enterococcus faecalis
ERNIGLKKLFKIVGNNLLRWLQECYVLIKVNNKYLITSIFLREDPEKLIHWLKKVKKQHFFSHTC

SEQ ID NO: 5258 - protein, 573 aa, Enterococcus faecalis
TDFIKLVLTNEKKSFLSPMTNDQKQGIIMHVRKTLLSEKFAKEAISMKERERVLELVKKGILTSEEALILLENMATEKDEKQIEKAAEKVDTQNIGTTNKEDQVSDLMNALEKGESEGPTVDSFEENTQDSAEKDRENLERILDELATKANRASAELDEVNAEIAGIKEEIKEVAEEIGTLDTKEELDALTEDEQVQRKDLHVLIAQLEEKLATQSTEKTALEEELKNIRKEQWKGQWNDTKEKVSCQFSEEWKDQATDTFNQVGGKVAEVGGQVGEFLKKTFNSFSDTMNDNVEWKDIKMKVPGVATTKFEHEFNYPNPQASLIDVKVANGTVVFKTWDQEDVKVEAKIKLYGKMAGDSPMEAFLERSDIDVDDETISFQVPNKRVKADLTFYLPKRTYDHVSVKLLNGNVLVEELTAKDVYTKSTNGTITFKKIDATMLEIEGVNGEIKVLEGTILDNIIETVNGDVSISAAPESLSVSLINGDIRITAKEKTLRRVEASSANGNIKLALPNDLGVEGQVKTNLGSINSRLTDIEVVREKKDRGNQQLHFRRVLEESMAQINAFTTTGVFS

SEQ ID NO: 5259 - protein, 233 aa, Enterococcus faecalis
IWLKGGKRMLRTQFEEELLNLHNQFYEMGMMVSSAVHKSVKAYINHDKKLAQEVIDRDIEINDMEVKLEKKSFEMIALQQPVTTDLRMIITVMKASSDLERMADHAVSIAKSTIRLKGETRIPEIEKEISDMSDYVKKMVDNVLIAYVKTDQKDARMIAQMDDRTNEYFDSIYKHAVEAMKANPETVISGTDYLHVAQYLERIGDYVTNICEWIVYLATGKITELNSNRDEQF

SEQ ID NO: 5260 - protein, 305 aa, Enterococcus faecalis
HITCNKRRGLVTIQLSSIWVKSLNTTIQEKSLHDQKFKQRKTTFQDILVRRSKMGKEIISSKDLHLYYGKKEALKGIDLTFNQGELTAMIGPSGCGKSTYLRCLNRMNDLIPDVTITGSVVYKGKDIYGPKTDNVELRKEIGMVFQQPNPFPFSVYENVIYGLRLKGVKDKQVLDEAVETSLKAAAVWEDVKDKLHKSALSLSGGQQQRVCIARVLAVEPDIILLDEPTSALDPVSSGKIENMLLTLKEKYTMIMVTHNMSQASRISDKTAFFLQGDLIEFNDTKKVFLNPKEKQTEDYISGKFG

SEQ ID NO: 5261 - protein, 263 aa, Enterococcus faecalis
MIPINFNRIAKRPRLRYTRKTYMSFTGTNEAIKGVDLQFEKNKITALIGPSGCGKSTYLRSLNRMNDGIANSRVTGKIMYKDVDVNTKEVDVYEMRKRIGMVFQRPNPFSKSIYENITFALKQHGEKDKKKLDEIVETSLKQAALWDQVKDNLNKSALALSGGQQQRLCIARAIAMKPDILLLDEPASALDPISTGTVEETLVNLKDDYTIIIVTHNMQQAARISDYTAFFYMGKVIEYDHTRKIFTRPKIQATEDYVSGHFG

SEQ ID NO: 5262 - protein, 300 aa, Enterococcus faecalis
ERSLKIMNAKKADKIATGILYAVSGVIVLILAALLIYILARGIPHISWEFLTQPSRAYQVGGGIGIQLFNSLYLLLITMIISIPISLGAGIYLSEYAKKNWLTDLIRTSIEILSSLPSVVVGLFGFLIFVVQIGYGFSILSGALALTFFNLPLLTRNVEESLKAIHYTQREAGLALGLSRWETVKKVILPEALPGILTGVILSSGRIFGEAAALIYTAGQSAPALDFSNWNPLSVSSPISIFRQAETLAVHIWKINTEGTMPDGAAVSAGASAVLILVVLLFNFGARFIGNRLYKRMTSA

SEQ ID NO: 5263 - protein, 326 aa, Enterococcus faecalis
CKKGTLFLSVKVGLFEEEIFLEDVQKKLLTKSKRAKMEQRGKFISFLCIALIVAVVVSIFYFVASKGLATFFKDKINVFDFLFGTNWNPSDIGADGKPMVGALPMIAGSFIVTFLSAIVATPFAIGAAVFMTEISPKKGAKFLQPVIELLVGIPSVVYGFIGLSVIVPFVRSIFGGTGFGILAGTFVLFVMILPTVTTMTVDALKAVPRHYREASLALGATRWQTIYKVVLRAAVPGILTAVVFGMARAFGEALAIQMVIGNAAVMPTSLTTPASTLTSILTMGIGNTIMGTVENNVLWSLALILLLMSLLFNIVIRIIGKRGALK

SEQ ID NO: 5264 - protein, 306 aa, Enterococcus faecalis
FSSPTYNGKIEWIEINWRNNESMKKRLLLFIGLASILTLTGCAKWIDRGESITAVGSSALQPLVETASEEYQSQNPGRFINVQGGGSGTGLSQVQSGAVDIGNSDLFAEEKKGIKAEDLIDHKVAVVGITPIVNKNVGVKDISMENLKKIFLGEVTNWKELGGKDQKIVILNRAAGSGTRATFEKWVLGDKTAIRAQEQDSSGMVRSIVSDTPGAISYTAFSYVTDEVATLSIDGVQPTDENVMNNKWIIWSYEHMYTRKNPSDLTKEFLDFMLSDDIQERVIGQLGYIPVSKMEIERDWQGNVIK

SEQ ID NO: 5265 - protein, 133 aa, Enterococcus faecalis
NRSNRSNLGLSSCCITFIRCMFLISNTIRITILSRQKEIQIMRLVGAKNSFIRWPFFLEGAWIGLIGAIVPVIIMTLGYHQVYNMFNPQLLRSNYSLIRPEDFIWKVNLLMIATGMIIGSLGSVISMRRFLKI

SEQ ID NO: 5266 - protein, 209 aa, Enterococcus faecalis
IRFVTVLLPLKMVALSVTKWKENTATMIRTFFSHLFESIKSLKRNGWMTVASASAVTITLVLVGIFMGVIFNATKLADDIEKNVTVSVFVDIGTKQNEMKTLEKQLKGLDNVEDISYSNKDQQLKKIQEQMGDAWNLFEGDSNPLYDVYYVRAKTPEDTKDIAKQAAKFPSVFKADYGGVNSDKIFKIAQTVRTWGLAAAALLLFVACS

SEQ ID NO: 5267 - protein, 244 aa, Enterococcus faecalis
HVIMSRIEEKRDGENAMIEMTDVLKIHSNGTTAIRNISVEIDLGEFVYVDGPSGAGISTFIRLMYREEKATKGNLTLAGHDVMKIKNKEVPYLRREIGIVFQDYKLLPKKTVYENVAYAMQVIGRRPREIKKRVMEVLDLVGLKHKVRVFPSELSGGEQQRVSIARAIVNTPKVLIADEPTGNLDPENSWEIMKLLDRINAQGTTVVMATHNSTIVNTIRHRVIAIENGRIIRDQVEGEYGYDD

SEQ ID NO: 5268 - protein, 249 aa, Enterococcus faecalis
SDHMIHNNGLNWNYTLVRGVIESQDWGSMLLRMYTRWAESHGFQVETLDYQAGDEAGIKSVTLLIKGYNAYGYLKSEKGVHRLVRISPFDSAKRRHTSFCSVDVMPELDDTIEIAINPDDLKIDTYRASGAGGQHINKTESAVRITHIPTGTVVASQAQRSQLKNREQAMSMLKAKLYQLEMEKKAQEAASLRGEQMEIGWGSQIRSYVFHPYSMVKDHRTNYETGNVQAVMDGDLDGFIDAYLKQRLS

SEQ ID NO: 5269 - protein, 93 aa, Enterococcus faecalis
VNMFSFEEVLFELDNAISLKTLKNWANKIEKLTDVRFVRQYAKNKQGRNYSYKVFSVEQVEQLKQLVQLRKQNVPLDQPMIEVFKLPHRREGG

SEQ ID NO: 5270 - protein, 177 aa, Enterococcus faecalis
KGIVIGMNGKLTLEEFYKKMSSEIYRKVKLKYKKKDLDDRFSQVLHNSSFRFIYRKYQNRPDSLLTYQESEMELDKNLDGLVDEVLKGLTNVRQIDFSEYLETVKRATFKRCSEKTTKYFSSQDFNSIFREECFDFVKSAFKRDSDGESVICCDDLDILMEIVVKDCVEKVMRVINK

SEQ ID NO: 5271 - protein, 98 aa, Enterococcus faecalis
MEFKNSNQLMEYWETKVKEFEKELNSGISQLSKEERQESCVVEAKKYLEEKRKYANNLHALFYVEGSYQNSNEVDRKFDREFYPAFYSFLSEIDILAH

SEQ ID NO: 5272 - protein, 93 aa, Enterococcus faecalis
GRRFLLDSSEIIKRVRERVYVEVKKRYKKPDLDIRIRDILYEQSESYAKLVRFSNGKRIKKLADPVEFEKFMENRGAKIVDEVIVGLNEKGEV

SEQ ID NO: 5273 - protein, 502 aa, Enterococcus faecalis
MFKKLFRYRGRRIRYSSRNLLALYRVLFFMPIFVCLGYFVGYKWLYPLYLSNPPDWKIYIVPALIIVGVSIGAIVLITLLVKASIINAGYFSKVEQRQVLARMIIDNGYYTKKQVKSSDGKTREKIKFPKIYYKSAKNSIFVSFETAGNKFQEKFETIGGFLETAFHADNLNKIDEKGFITYELASDVYNKRIWIKDMQADKGKVQLMKGLYWYFDKDPHLLLGGGTGGGKTFTILSLIYALCRVGEMEICDPKNSDLMALGKLPMFAGKVHTGKTDIVNCLKNAVELMNARFEMMNNSPDYKMGKNYAYYGLKPKFIVIDEFAAFKAELANDYSTDGEVDEYLTQLILKARQCGIFLIVAMQRPDGEFIKTALRDNFMFRMSVGRLSETGILMIFGDENKNKNFKYVEKIDGQKVYGRGYVAQGGSVAREFYSPQVPTDFDFIEEFIKISKELGYEDVSKEVQEEVSQKIAKHVDKEALAEIDEELEKGQAKLAKLSEKFE

SEQ ID NO: 5274 - protein, 128 aa, Enterococcus faecalis
RRKLKYLKEKNRDIRVLKGTLIYCEDVKSALNRCSRSFEVFSHDRVFFHAISMSCMQVGELANSFSEGFKERNSGAVDWRQLRSIRNIFAHAYSNINKRTVWELATVFFPVYEEFCRQELARLQKEGR

SEQ ID NO: 5275 - protein, 117 aa, Enterococcus faecalis
TLEEVRQMVMTMNEIKERVKPIAERYEIPVIYVFGSYARDEAKESSDIDFLVGTTGLPEKYRWSVYSDFFDELKEAVEHEIDLVELEAFEQPIDSEYQKEFYDTMMKEKVKVFEREK

SEQ ID NO: 5276 - protein, 114 aa, Enterococcus faecalis
EGVSCKLMSSLSEKMEHKQVRYRAFLERRFYSYRGWQSFNYYRDLYLKLFDETSNGLIQFLLLDDSFFESEQAVLKLLDSFLDQLVRAYDLKFHEDFEKKVYFEEYPLGISEVN

SEQ ID NO: 5277 - protein, 88 aa, Enterococcus faecalis
KRFFIKKGKMLVEKNNESTKLLQRKIRYMCAVEGEMEFYVLRPLFTDDVNVQAVVMTFQDVYDNSFFYEGSAEGLYQTIVRWIEKNIA

SEQ ID NO: 5278 - protein, 65 aa, Enterococcus faecalis
VQKEWVKLIKNRSDWMKQGKRPVRKEKELLKSRRLNAKNWLVERRLKSSVIFLHKESGNLKEIFY

SEQ ID NO: 5279 - protein, 75 aa, Enterococcus faecalis
KMNRLEELIKNPTKFNLSNEAIDSLRELFVTFETNPFFPMSRYDYARRYLTQLYFAGFISSDLVQSILSEFKKSG

SEQ ID NO: 5280 - protein, 135 aa, Enterococcus faecalis
IMGLTFENNTIENFDVQGTFGTMNFLEVVAINERDGEGNVTDEVREQRVTVYSSKLNDQVEIAIDPDYDVSGINYDDEIELTGNVTARGWLNTFKGFNDNVQTEQAFKVRSAGIKKVGAVKPTQTPQPREKQENK

SEQ ID NO: 5281 - protein, 113 aa, Enterococcus faecalis
KKEIILANRIQEIALSDKNLGSKIKAVYKTERDIYVNGAPGRGRVFTASSEKQRDFEIFVPHLRNSQMLNGREEVKLIDPVARINVKRNNIGNSRSIDMVVYAKRLEVVGGNK

SEQ ID NO: 5282 - protein, 89 aa, Enterococcus faecalis
KIRRIGMKEELLLFVEKFVARMKRQKKAFSITDIEKSYNLERKKLGKSAVKLTNMERLTIESRLLKNQILQRTYKMTGYHKPCQVVFFS

SEQ ID NO: 5283 - protein, 66 aa, Enterococcus faecalis
KKEVKNVMKIKFLTANEVSELMNCSKAKAYGIIKELNSELKEQGMKTSAGRVNEQFFAKKFGFEHE

SEQ ID NO: 5284 - protein, 129 aa, Enterococcus faecalis
HLVILLQKRGDIMAFSDKLKQLRTKKGIKQSELAEILHLRQSSISDYENNRSTPNPETIKKIAEYFNVSANYLLDIPDKNDTKLDSTIKETIEELKNEDTLLFMGKNGDIDEETARLLKIAMKNAINHC

SEQ ID NO: 5285 - protein, 92 aa, Enterococcus faecalis
GVSPIRSIYSKIKSEVEGITNFYSSNDPKRISEFLGIHVLKSNLANVEAFLQYYNHTYIIHINSNITDETKQDKILAHEPAHYFLHKATTGN

SEQ ID NO: 5286 - protein, 496 aa, Enterococcus faecalis
SLRNKPKIIDIKDEQMKKEEMQMRNTRRQKSGKNNKKKVIITSLVGLALVAGGSYVYFQSHFLPTTKVNGVSVGWLNVNAAEEKLAQVNQTEEVVVQTGTKEEKIQLPKKYQLDQKFLKDHLHSSKVKLPLNEAFKKELEAKLATLSFPEGKPSKNASIRRGNGTFEIVPEEQGTVVDTQRLNQQIIADVEAGKGNYQYNAKDFYKAPEITKEDQTLKATLTTLNNKLNKTITVDINGEKVAFDKTQIQNVLNDDGTINKEKLTTWVTQLETTYGSANQPVLFTDVHGTTRRFKNNGSYGWSIDGAKTQELLVNALNSQEQTNAITAPLVGDTKENSKIANNYIEIDLKDQKMYCFIDGKKIVTTDVITGRYNKGTATVPGFHTILYRTTDVNLEGQMLDGSRYSVPVKYWMPLLSQGGVVTQIGIHDSDHKLDKYGDKEAFKTDAGSNGCINTPGTEVSKIFDVSYDGMPVIIYGHIYDDAPGEFDKPVDYGEEV

SEQ ID NO: 5287 - protein, 64 aa, Enterococcus faecalis
IGGTKMPFVHVELIEGRTEEQLTNMVKDITEAVSKNAGAPKENIHVIVNELKKDRYAQGGEWKK

SEQ ID NO: 5288 - protein, 682 aa, Enterococcus faecalis
DFLFFNKGNRWLFRFIVKNRNTMKRFKSKKLKGENFIMSIHITFPDGAVKPFDSGITTFDVAKSISNSLAKKALAGKFNGVLIDLDRPIVEDGSLEIVTPDHEDALGILRHSSAHLMDNALRRLFHNIKFGVGPAIDSGFYYDTDNGESPVTAEDLPAIEAEMMKIVKENNPIVRKEISRAEALELFADDPYKVELITDLPEDEIITVYDQGDFVDLCRGVHVPSTGRIQVFKLLSVAGAYWRGNSDNHMMQRIYGTAFFDKKDLKEFIKMREEAKERDHRKLGKELDLFMVSQEVGSGLPFWLPKGATIRRTIERYIVDKEISLGYQHVYTPIMADVELYKTSGHWDHYHEDMFPPMDMGDGEMLVLRPMNCPHHMMVYKNDIHSYRELPIRIAELGMMHRYEKSGALSGLQRVREMTLNDGHTFVRPDQIKDEFKRTLELMVAVYADFNITDYRFRLSYRDPNNTDKYFDDDAMWEKAQAMLKAAMDELELDYFEAEGEAAFYGPKLDVQVKTALGMEETLSTIQLDFLLPERFDLTYVGEDGENTHRPVVIHRGIVSTMERFVAYLTEVYKGAFPTWLAPIQATIIPVSVEAHSEYAYEIKERLQAQGLRVEVDDRNEKMGYKIRASQTQKVPYQLVVGDKEMEDATVNVRRYGSKETSVEDLSIFIDSMAAEVHNYSR

SEQ ID NO: 5289 - protein, 668 aa, Enterococcus faecalis
SSQLQPLKKEKKSKGLLNSEVLLTFFNNKIIKYFLRAGNNPDFLTIFCYNENAKLFSEGTRGMKKNSFIDKIKKTDAAAKSQRGRKPHIPFRLNLLFFVIFTLFVSLIVRLGYLQIVEGEEFNKKITANSSLQITTPSPRGQIYDSQGKVLVSNKANLAITYTRGKNIEGKDILPIANKVNELINVPVDPNLTDRDKKDYWLANPENLKAAQSRLTDQDKEDEKGNKITDEGTLYAKAVEKVTPEEIAFDDRTLQAVTIFKRMNAASQMNTVFIKNEGVTEGEIATIGEHTAEISGVSTGTDWTRDYSQSGALRSLLGTVSTEKQGLPAEEVDEYLKKGYARNDRVGTSYLEKQYEDVLQGKKAKSEVVLDNNGKIVSQTPISKGEKGSNLKLTIDSNFQNKVDEILQRNYSQIVKTIGPYSENAYVVAMNPQTGAILAMSGFHHDLATGEVTPNPLAPILNSEVPGSVVKAGTLTAGYETGVIKGNDVLTDEAILLAGSNPKASWWNASGGTTMQLTAEQALEYSSNAYMMKLVFKMMGVNYYPNMIFPYEVGDDTVFKELRKAFAEYGMGTRTGIDIPGETTGIQNKDFKDSSSAPQGGNLLDLSFGQYDTYSALQLAQYVSTVANNGIRVQPHVVEGIYGNDENGALGKILKEIEPKVLNGGEYF

SEQ ID NO: 5290 - protein, 61 aa, Enterococcus faecalis
ICPRGDGVVICSEELAVIFLLNSSPSTICKYPKRTINETNKVNITKNNKFNRKGICGFLPR

SEQ ID NO: 5291 - protein, 101 aa, Enterococcus faecalis
DFFQQVFYNVVNGTIPFTTARGLKSDKFSIAAKTGTAETQATDANGVNHTTVNSNLVAYAPDENPEIAISVVLPHLNDEASKPNQTIAKEVLEAYMEMYKK

SEQ ID NO: 5292 - protein, 63 aa, Enterococcus faecalis
EISWKDQLLVGGENMRVNITLECTSCKERNYLTNKNKRNNPDRLEKQKYCPRERKVTLHRETK

SEQ ID NO: 5293 - protein, 226 aa, Enterococcus faecalis
KLEKNTKRKFYTKDELEHFLNTADSIANQAKEESLVLKYYADLDCAIFRLLSFTGIRVGEALALNWNDIDLKKQVVNINKTTAISTNGLTINDPKTPNSIRKISFDNKTAYILKKWKLRQHEALMKKGGFKTQLIFTKIDGTMSRSQDIYQRSKRLAEKANLHSIGCHGFRHTHATLLFESDNVRSKIIQERLGHSSLQITMDTYTHVSDEVTKEATDAFSSYVNF

SEQ ID NO: 5294 - protein, 167 aa, Enterococcus faecalis
AMATFKQYTKKGKKYWKVTAYLGVDYLTGKQINVTIRNCNTKKEAQLKLNQKKLDFDNGNLANEHTRLTTFEEVYYMWLDEYKKTVRESTFIATERRMKKHILPTFGKMRLERLTVKIVQKSVNEWYKKNEMGKVLLSYASRVCDYAVGLEIIDSNPFKKITKPSSL

SEQ ID NO: 5295 - protein, 261 aa, Enterococcus faecalis
KSPCWEHGLKPHLESERTSLKINQKFYNYSIVVLALISIALVILDFSNVINISNPPFNVIDSIILITFTIDYIVRFFISKNKIKFFKENIFDLIAIIPFDAIFSFFRIARLFRIAKIARLAKLTRAIGVVGKLTRNTKSFLNTNGFLNVIYLSSVLIVISAMIYSYAENVPYIDAFWWALVTTTTVGYGDISPTTPLGRIAAIILMIVGIGFVGMLTSTITEYFNKSNESNNNDEKDEKIDMLIKKINDLEKAIRKLENKK

SEQ ID NO: 5296 - protein, 120 aa, Enterococcus faecalis
VKGCAYMKSIKELVEEYNVELVFTTLNKRACFDPTYGIIFVNQNLTPSEQEEAIYHELKHVKEHVDIMALYKIPVFRSKMEAEAEQYMFRSLIEKYEGQYNYSNVIAHYNLKMGQEVYLK

SEQ ID NO: 5297 - protein, 250 aa, Enterococcus faecalis
KGKSHIEKLRGFMMASSETIDVPKGFIRMLYCLEQDGYAYLDQQRCSFSAGQVMIVNEATSVSYQGQGMSMIIFYFKKHYFLDTLLNQLAEEPVMYRFFTEIASSEFENIPRYFVFASQPNSDVHVYSLLLLKQIVKMAYFNNKVTKAAFVLLVVELGQLPREALKMQDNYLSNHQRVEVILAYIEQQIAHVTLAEVAAKFHFHPNYLSNFLKEKTNKTFTEIVLAYRIQLAKDHLKQTDLSLLTSRWPE

SEQ ID NO: 5298 - protein, 399 aa, Enterococcus faecalis
ERILMKKITQEKLLSSERFFGQGILTEDFIDQSIDKVLKKVEKNIQKLGDKFPTPATTDNTYIAMDNTEWTNGFWTGILWLCYEVSGEKHYREVAEQNVKSFIYRIENEIEVEHHDLGFLYSLSCVSTYKLTGNEAAKNAAISAAEKLLQRYQSKGEFIQAWGELGNQDNYRLIVDCLLNIPLLFWASTVTQDKRYREVAVKHYHTTIDNAIREDSSAYHTFFFDAETGDPLYGKTRQGYSDSSSWARGQSWLIYGLALFRSYCPEEENTEIFEAITNYFLNRLPKDFVSYWDLIFMDGSEQSRDTSATAIAVCGMSLMDAFLPETNSHKLVYKCAQHSMLRSLSENYTESKTDGITALLNEGVYSWHSGKGVNEGNIWGDYFYLEALVRFKKNWKMYW

SEQ ID NO: 5299 - protein, 191 aa, Enterococcus faecalis
LFLSRSFSAIQKKLENVLVKTGGKKMQKPNVKMVRVDERLIHGQGQLWIKSLGVNLVICANDKAAEDSLQQTLMKTVVPKETNIRFWTIERTAKVIWKAAPSQTIFVVVGNLHDALELCKLGFPMEQLNIGNIHADEGKEKISQFIYLGKEDKQALCLMRDNYGVTFNTKTSPLSNDGSQYLDVLMEKISN

SEQ ID NO: 5300 - protein, 279 aa, Enterococcus faecalis
KEKEKEKQMEISLVQGILIGLITAFCYSGQLLGIYTNRALVMSFFVGVVLGDIPTALTFGALAELAYMGFGVGAGGTVPPNPVGPGIVGTIMAITLKHQGVTPESALALSFPFAVLFQLVTTAIYTIFSGNVKWSKNVIEQGKYTRFNLIANSTYIAFAVAGFMIGLLAALSRPGLQAFVEALPNWLINGFSVAGGLIPAIGFAMIMSVMLEKSLTPYVLLGYICAAYLELPTMAVAMVGTVFALIQYYGKDKTIVGEKSIRDESQTTLMEEEDFSNGI

SEQ ID NO: 5301 - protein, 278 aa, Enterococcus faecalis
WKRRILVMESRTPKLSQKDYMKTALRSYLLQNAFNYTSYQGVSYLYTIMPALKKIYKDEPEKLKETASANLEFYNTNPQMLPFITSMQLAMYDNGQSVTDTRSIKMALMGPLSGIGDSIAQFGIAPLFSTIFAGLAMDGLGFAPMGFWFSMLISMLIIKLLMGYLGFKLGTSVIETLSDKIGKISSAANIVGVTVIAALATSFVKANIAIKYSHHVESGEKQVIAIQDILDKIMPKMLPVILTILVFYLIKKRNWNTYKLLILLFAIGIAASVLGILA

SEQ ID NO: 5302 - protein, 649 aa, Enterococcus faecalis
KFESGNTMNLQRIEDYQLKFFQQDWLSEYLEQQSQFLKPLFERTSYLLKDQIIYNDAMDMEACSIPYSLKEYAWNRYPDDDPEWLFMLSRQSFLVDLAQAYALTKKERYLQKWHSLLIDFINDEGEPNSTNRDVWRPLDVGIRVTNWMKSLTYIPIADFRLLGIDDVLNNALLIHLDYLERSYIDKYRLSNWGVLAIGGMAAIDLFLPELVTSKQRDLIWSRLAEQLDLQFYSDGIHWEQSPLYQHEVLMTFVYLLQISEYLEVQLPLDLRMKLKTPIFSTHYLADNQDILNPINDSDHVNFHYVYDIYRKLGFIFEPSMTANMARLWTGDLYEERIWETMKPKELFRGESSGLMAYKAEDIYFTLFNGLHGSAHGHASTGGFTLQLQGDDLFSDSGRYSYVNKSERLQLKECASHNTMFIAENPHTLVSDTWGYDKLPTPLFQQIKELSVGFFAECGWLDKADQNPMIFERSFIYLKSINSVVIIDSFAGQKETEITSTYNLAPSINCQKEAHRFALTTNKHKYTLLFAGGQTQQSVAKGSEIYNQLNEHPRLSNKFCYKTGKEIQATVISPLEDIQITPIKVSQTGENEQFCQAKGFRIIAGSEKFDLFVMREDIVKGNKLLVSEYGQFFYGRLVLIDQKEAKIRIK

SEQ ID NO: 5303 - protein, 74 aa, Enterococcus faecalis
VFLISCEDLMVTGLQDIQKSAIDTRMSSKLRAGTAGSAPNEFHLNRIVDQAVQLNETILDPSVYWSPVLEEINQ

SEQ ID NO: 5304 - protein, 142 aa, Enterococcus faecalis
RSNEMKLLITGHSEFSIGMQSALAMIAGELEDVIIIPFLAEETVDEYRQKVAAEIQMFDQAICFTDLLGGTPFKTCVEFSEEKDQVFVVSGTNLGILLEGLMMRNSVTDSFEIAETVVQAGKSNIMLFEKNNETEELPEEGI

SEQ ID NO: 5305 - protein, 220 aa, Enterococcus faecalis
ERRRRMKKVEVLKRLENAGVIAVLRADSKEEALKISHAVVEGGMIGLELTFTVPQADEVIRSLVETYHDEKDIVIGAGTVLDAVTARLAIMAGAEFIVSPSFNRETAEICNLYQVPYLPGCMTITEMQTALKSGVDIVKLFPGSTYGPSIISAFQAPLPYLNIMPTGGVSLDNMASWFEAGVTAVGVGGNLLAHAKTGEFGKVTALAKQYMAKFREIKEN

SEQ ID NO: 5306 - protein, 340 aa, Enterococcus faecalis
RTAALIHDIGNPPFGHFGEEAIRIWFEKNGPLYACWSDFSEQQQNDFLNFEGNAQTIRLLTKLHHDNGTSKAGMKLTATTLDTVIKYTASSDQLNKQQLLSKKVGYFYSEKQVFNAIKFATGTQNKRHPLVFLLEASDDIAYTFSDIEDAYNYGLYSYQDLKQFVDAQTGTKKFLMLEKDKTEEATLQEFLRKTQRAVCQSVAKNFANHYDLIMRGIYHNEIIIEDCDEVKCFQALKNFSRVYVFQTKTILDQEVLGFNIINRLLDEFVPVVLKYEKVSMNKYEERIFNNISESAKALYRREAKNATEAEKDYYRLKMAVDFVCNMTDGYAKKVYDTLFT

SEQ ID NO: 5307 - protein, 928 aa, Enterococcus faecalis
ARGDFMLKTQIVDYLRNQTAFFEPSLVSEIFTASNIATTFSIKRNTASHYLNQLNEEGILVKINTRPVYFFHKEAFQQQNYLLKRTVYQSFQEMIDEQPVFDRKSDFFQSVIGYRGSLAQTIEQLKMAALYPGGGLPVLITGESGTGKSFLASLYYQFCLSKELLDDSAPFVTVNCAQYANNPELLTSQLFGHLKGAFTGADSDKIGAFQSAEGGVLFLDEVHRLSPEGQEKLFTFLDQGIIYRMGETNRPIPVTCRLCFATTEEISSTFLTTFLRRIPIQIKIPSLAERTQAERKQLIMRAFYEEQQAIQKAVTITPQVIQLLENHHYVGNVGELRNNIKIITARSFAANLDKCVIPITLHDLPKEFLDQSIKLVPDENELPIRLDEQTNLVSLLEETELAQRRIIQSYERILRLYVSHHHHLSTANNDISKEIERLFDDLLFEKKREKNHEMLLFITQNIRQLLETIESSYQIRFNGSLVYALSTYLFQRRCIDWFPEQEPTTVIDELLTEVQTKLATSYGYAEQLLTLVKRSLDIELSQMDRIIVTIYLHYSGSVKKSHYPKAVIVAHGYATASSIANVANRLLNVPIFQSFDMPLDVTPKKISEHLIHYMERQETRNGLVILFDMGSLKEIYQYFPAEEEGPFLLMNNVTTSLALSIGEAIKDEVSFEELPQKALTVHPNEWEIILPENKTERVILTTCSTGIGTAVKIRDLLEKSLPAEAQLKIIPCEYNQLRNAESIKESFPEYEIVGIIGTNNPSSNDLPYISLEELIAGKGITTLLEWTKRELTKDMLSYVNHELIRNFSLDRVIQSVTILDTEKIIRQVEVFLIQLEERWQQTIQNDRKLAVYVHVSCLIERLIRNEPIENYNGAEQLKQCQRTVLQELKEAFSVIEKVYSVNIPESELFYVYDVLFGKTEFNNAESDF

SEQ ID NO: 5308 - protein, 161 aa, Enterococcus faecalis
KGGSATFLALFLLYKEVSEVKKMERKIILATHGNFAAGIQTSLALICGETKNVECLCAYMEQPYDLAKTVQDILKNNQQNELIVITDLFGGSVNNEFFNYVGKQAMHLISGLNLATLIEIYTQINTVDSLVDLVKRAVENGQESLCYCNELSSKEILEEEF

SEQ ID NO: 5309 - protein, 168 aa, Enterococcus faecalis
RNFRRRILGGNEMIKLLRVDHRLLHGQVAFSWTQGLGADCILIANDDVPKNDIRKTTIKLAKPAGVKLVIKTIEDAIAALKSGVTEKYKLFIVVESVEDAYRLATAYPEIKEINLGGMKVRENTRNISKAINITPDEEKMVKELVANGCEVEIRQVPNDKKVAALNVL

SEQ ID NO: 5310 - protein, 268 aa, Enterococcus faecalis
KGEIKMIGQAILLGCIAFIAQSEYALGTSLLSRPIVTGLFVGIVLGDVKTGVIMGATLELAFIGSFSVGASIPPDVVTGGILGTAFAITAGAGTETALVLGLPIATLTLILKNIYLGLLIPIMSQKADQYAEEGAYKGVERMHLLAGFGLSFMLALIVTISFAVGSNTIKGLLDLIPEFIQHGLSVATGIIPALGFAMLARLLINKQVAPYFFLGFVLMAYFKLPVTGVAILGAITAVIVVNIMNYAKGKNETIQTTSGEVIDDDEDF

SEQ ID NO: 5311 - protein, 278 aa, Enterococcus faecalis
LMMTKTSKTKTENLITKKELNQVFWRSFQMEFSWNYERQMNMAYVYAMIPILKKLYPQKEEMAAALKRHLAFFNTTPHIVTFILGINAAMEEENVLDENFEVGTIDSIKTSLMGPLAGLGDSFFWGTLRLIATGVGTSLALQGNVLGPILFLFIFNVPHVIVRYLLNRWGYKLGTGFLKKIPANGMMESLTLGASIIGLMVVGAMTASMIDLTIPITISGSGKNAVTVQNIFDDIMPKLLPLASFGFVFYLLKKEVKPLAILGGMAIVGILGSLIGLF

SEQ ID NO: 5312 - protein, 134 aa, Enterococcus faecalis
LVYFRRQNMKTMLDYINEEQAALTQILNQFQLTDTDVSKVTHCLILATGSSHNACQAAKVYLEEVAPIYVEIQEPFNFAHYGKVDDRFDLVVAVSQSGKSASTIDAIAKIKNQTSVKTVALTSDVTSPITGGCG

SEQ ID NO: 5313 - protein, 84 aa, Enterococcus faecalis
QVMSPARLREVVDEVLDLKIRLETVGFVTKGYTATLLNLFLFGLKLGYQKHQLTKVEVEEELAKLTKAIQEIDSVIYKTEQFWQ

SEQ ID NO: 5314 - protein, 160 aa, Enterococcus faecalis
TKKELTEGTRFIAIGYGPNIGTAKEFETKFTETVRLPSQGFEVEAYMHGPYLEADNTHLLFFIENQSPIQARSQALKNYLASYVGQCYTITTRSTRASNTLDLASDVEEKISPLLLVIPFQYLAHQVATSKGIDLSQRIFDDFDCVLKSKIAKKEGNQPC

SEQ ID NO: 5315 - protein, 257 aa, Enterococcus faecalis
NSKERGKSAMLKFNEEQQIKDIRGALALRSDVEKVVDQVWTKGFDAVYYLGIGGTYASAMQAVTYANGKSNLPIYVQHAAEYYTTGNKRLTEKSFVILSSVTGTTQEVVQAVQEIKKVGATLFGFIDAKDSLLADLCDYVVTYPAPGTEQIKFFMVADRLMQKNNEFTDYENYYQELEEYLPTGLAEAEKSADAFGLAFAEKHRHDSIHYFIGAGNQWGAVYSYAMCYWEEQSWLRSKSIHAAEFLTCNTVTSPSIS

SEQ ID NO: 5316 - protein, 145 aa, Enterococcus faecalis
GHVRHGLVDVGLKQVLTSSAIPHEIADKASSRYVNGHTYLMIETKGAILTPAKVLSEASVPKKALFRNRGSLLNKQYNLFDKPEDLNEYYDANQPPFLLLTYGGSNHQLRFVRLGLPDIGVGRWIDQIDITQAPVLLKNPEEVRK

SEQ ID NO: 5317 - protein, 69 aa, Enterococcus faecalis
KRQNVNMVCCWGVMKKGEKIMSILKEHLKRNCDARMVGVLSLSIREAYRYLMELTERESIFQRAEMKKV

SEQ ID NO: 5318 - protein, 517 aa, Enterococcus faecalis
MYKIGIDVGGTNTDAVILDHQLNLIHSVKVPTTDDIQTGIAGALNKVLAESAVDPTKVTHAMLGTTQCTNAIVERKKLAKVGVLRLGYPATASVLPYTAWPKDLVATLSETYALAHGGYEYDGQPLTALDEEELRGILASWRGEVEAIAVIGVFYSLKNDQELFVQALAKEVLGADVPVSCSSMIGSVGLIERENATILNAALHKVIKVTSEGFEQALEQEKIHHAQVYLCQNDGTLMSLTYAKQFPILTIACGPTNSIRGASYLAGLKDAVVLDVGGTTSDIGVLVDGFPRESSLAVDVGGVRTNFRMPDIVSIGVGGGSLLREQPDGSVTVGPDSVGYRITQEALVFGGTQLTTTDIAVRLGHAQVGDPSKVAHLDQAFAEKVYQKIGELVSEAIDRMKTSSADVTVVLVGGGSIIIPEELTGVKALIRNKNGAVANAIGASIAQISGQYEQIYVYSKIQRDAALTDAQEKAVQQAELAGAVPGTIELVEVEETPLAYHPENATRLRVKVVGNMY

SEQ ID NO: 5319 - protein, 374 aa, Enterococcus faecalis
KWNEEEECRRMRYLDAEAIENIATGAAFLGTGGGGDPYIGKMMALSAIEENGPVKLVSPEEIAAEDFFLPAAMMGAPSVAIEKFPKGDEFVRVFEKLGKYLDQETIAGTFPMEAGCVNSMIPIVVAAKLGIPLVDCDGMGRAFPELPMVTFHLNGMSATPMAITDEKGNIGIMETIDNTWTERLARVQTVEMGASALVSIYPATGKQLQDYGIHNIVTLSEEIGKVIRGTYADEQEKRQALVEVTDGFELFQGKILDVEREVKGGFNLGRVKLSGLNSDAGSEAVVHFQNENLIAEKDGQVIAMTPDLICMVDLETLTPVTTESLKYGKRVQVMGLKANAAWRTKKGIETVGPRYFGYEMDYQPLENLVAKEDK

SEQ ID NO: 5320 - protein, 135 aa, Enterococcus faecalis
LMSLIFQKKKKKVAVGAAGAIGTLLAVVGILNYFTPIMSVLSAMVPPVAGVMIAAYWLINKGDRTKWLPTPGVNKLGVFSWLIGAAVGGIPVIMSFFPNAPQLPNQPLIGIVLSFVIYYFGAKRQQTNTESLEME

SEQ ID NO: 5321 - protein, 350 aa, Enterococcus faecalis
GGMRMKLKNEQQQSWLSLAFVWAGAMISVPGLIIGGTLVAGMPLWEALLTGFIGYGIIVILMILQGIQSSDLQEPSVKVASQVFGIQGSQKIISIILAIACLGWFGLQANVSGGAFTNFLKIYGIDLPVSLSSLIWGIIMLISALYGIKILKILNYFAVPVLVLVCLYGLVASLRNNGWAAVSQYTPQTAGSFMSGLSMTVGSFALGAVIAGDYSQYVSSRKDVVKAATLGILPTGLLMIGVGAVLTIASNTADITEVFMNLGFPVLGIIALILATWTTNAVNAFSGGLALINVFDIPKEKEKSRCRCGRRDWNLISSCGDFKLLYADYVRPFCDGATSGWCNDCCLLVD

SEQ ID NO: 5322 - protein, 531 aa, Enterococcus faecalis
EKINQPKGGVIMSVRVNNLLKLPSLREATVLSGKNQLDTSVASLSFLEVSDMSLFSEKLHKTNEYHAGEILIGSFCAIRHDVVKQCETIRHLHELGEVGLILYYVGIIVPKVAEEVIQLADSLGFILIQMPKNDPTLRYNEVIYEVMKLLVNKNKMASFATDLLEKVSLLPEQNRSVEMTLKILSDFLKVNIALTTYTNEIISTINWPRSTKLPLTKLLYQSQEKVALGETTYFITSQKLPQKDGQTLKLYFIREEEQLTSFEMNQAVEVVQMALNLWGKNYDEVSEYALVQAIINDESDKMYQLAKKLMIDISSVETMWLLPIWQQGQEIHAIQQDLKDFLRYYYQTTIVQQTENYLIVLLGNYLHKQPEATISKEYLQATDYQDYLGEIILCPKVRNTTEVRVSYQTANQVAPFLKRVYPQRKVLSIAEIRTVQQMMTCLQAGEEAIQQRLAVIQPLLKESEQLMTLGTFLLDASSDFNECGERLFVHKNTVKYRISKINEALGYDMTNAAEAYEVYLAMILYRLVTNE

SEQ ID NO: 5323 - protein, 424 aa, Enterococcus faecalis
IDSFKGKKNMKVMTERTLKRPEVLAPAGTLEKLKVAIRYGADAVYIGGNAYGLRSRAGNFTPEEMAEGVTFAREHNAKVYVAANMVTHEGNQEGAGAFFRELRDIGISAVIVSDPALIEICATEAPGLPIHLSTQASATNYETLEFWKNEGLERVVLAREVSMEEVAAIRENTDIEIEAFIHGAMCISYSGRCTLSNHMSMRDANRGGCSQSCRWKYELFDMPFGTERRSKTSEGEVEEEFSMSAVDMSMIEHIPELIENGVDSFKIEGRMKSIHYVSTVANVYKKAVDSYMEDPENYVCQQEWIDELWKVAQRELATGFYYNTPSENEQLFGERRKIPQYKFVGEVIAYNEKTQVATIRQRNLFSVGDEIEFYGPGFTHFHQTVKEMYNEDGEAIDRAPNPMMLLTMEVTQPVAVGDMIRKKK

SEQ ID NO: 5324 - protein, 315 aa, Enterococcus faecalis
TVIKKEAIFMIELIATAESVEQAVELLATGVDTLYIGEETFGLRLPVSFTRDEQREIVKRAHEMGKQVLVAVNGIMHPEKMKLVPEYLTFLKEINVDKITLGDPGIVFIMQRDGLEIPYVYDGETLVTSSRQINFWSKRGAIGAVLAREVPFEEMVAMEENLAVPAEILVYGATCIHQSKRPLIQNYYNYTKNDKGVTKEQRLFISEPKKPETHYSIYEDSHGTHIFANNDVNLMNELTNLYDHHYRTWKLDGLYTPGENFVAIARLFAEAKAALEAGTWSEDQAAHATAEIEKLHPTGRGLDNGFFDLSADAIK

SEQ ID NO: 5325 - protein, 711 aa, Enterococcus faecalis
SHAIDTRPGTANQHIFSNGNCLPYTGVPFGMNFYAPQTTDQKGSWWFHPENRTFQGYRVTHQPTPRMGDLSHLLMTPVSGSLSELSLIHAQSSYRPEKSLFTPVEINLTQLRYQITSQLIPSMYGGILTIDYQQKDNHLLLTLPGRYQVKQLDDHQVAVKVINYSGCEDPDFSFYFVLHFEQPLTKWFAPSSGEDGKILLSFGNIAQQVVHFSSSFISEKQAQLNLAREISLRSTEMLQQGIADWHNYFDRLKVTHENPEHTKTFYHTLYRTFLFPQTFYELDENQQPIHYDTFSQTVRPGVLYTNNGFWDTYKTVYPLFSLIAQEKYEEMLEGFLNSYNETGFLPKWLSPDERGLMPGTLIDAVIADAAVKKIRPDLMPQFLEAMKKGATQQSERENYGRQGTLDYLKYGYVPSTYHESVNHTLDYAYSDFCISQVAKTLNDSETATFYRQQALNYQQLFNPETGFMQAKDTEGNFRPDFLDIRWGKDYAEGSAWQSSFAVYQDFAGLIKLYGSELAFEKKLIQLCNQAPNFNVEGYGFEIHEMSEMAAIDFGQLAISNQPSFHYPFLFSYIGKPEMAQPLLKQLMQTFDASPTGYPGDEDNGSMSAWYIFNSLGFYPVTPGTGEYVIGMPLVQTAEVKLSNGKQLTIQTSPNKVQQQFIHEIQLNQEKHTAPYFTHQELLNGGTLDYQLGIVPNPQNTAERPFSLSTEK

SEQ ID NO: 5326 - protein, 513 aa, Enterococcus faecalis
RERRRRDDNSSFVCSIRGEKMYRVMFVDDEYMILEGLKWIIPWQELGFEIVKTARSAQEALAFLETESIDVLLTDITMPEMSGIELIEQAKKKGHQFISLILSGYQEFDYVKKGMALQVQDYLLKPVNKQELLANIQRIKIELDQQKKSHARVRLYLENGLMRWLNDEISEGEYEELMQQFATIKPGDFTVLLVEAEMSFLETIKELFMKKGQLLFIESWMSTYHQLLLIYKGARQEAFLFIREIEAILAGQGQIFVGESVNEWETVYESYEKVKQLQAIETFYQEFLPNNQKEQMNRSAEDFTFLAFNQALMIGDMQTIQRELDAIFNQLSQQHATPEYVRYVVFLLFSDISRQYPTVLEENYEKIVEEIRASNNLNTLYALMQQVLAEVKNKPKIKKYSESVSQAVERIEQGYLEELNLKTVADELHLNPSYLGQIFKKETKRSFSQYLNQVRTKHAQKLLLYTDDTINEISEKVGFNNTNYFSKMFKKLNGITPKEFREQYQSNYAGVEE

SEQ ID NO: 5327 - protein, 591 aa, Enterococcus faecalis
CWGVPMSRAKIASLLMESWNKMKRIFKKLFKKKYLLNRLVQKYSLLLTSIILLTVAALCVYVTYTINLSIDSQKNNAVSQIDSYVTNKNNAATNMINELAGSASKIENMRKYMELSPPEYFDYTYSQWSEDRVSTHFGNNLSTLFSTFPDLEEVIIRLDEFDQVLFANRTATNGKKMDMSSIKKHGFQLMRIISDPYTGQPLGELYTVFSSQELLGNQADLLKKSGINAFIYDSAGNQIFSEKAQFTKEEERQLDKRMHTDSDIQQVFHNRYDITEIESSGRSTILLLTSRRVLFQQLFMNYAAILGIGLLLIVILLVGLNRLFKRYSQQVQLILEATRAIGDGNLKERIDTNQVQEELNDIASAINFMVDSLDQYIHDIYTLEIKQRDAHMRALQSQINPHFLYNTLEYIRMYALSRQQEELADVVYAFSTLLRNNINQEKTTTLAEEISFCEKYVYLYQMRYPDQFAYKFEIEETIADVEIPKFIIQPLVENYFVHGIDYQRQDNAIKVHAYREGEKIIVAVVDNGKGITANRLEEIRERLNQTEIDTEQSIGLRNVHERLQRFFGESYGLTIEGKEGEGTTIRLSFVA

SEQ ID NO: 5328 - protein, 103 aa, Enterococcus faecalis
ILFPIILVMFYIYMLLYEGSYFISTIDLMKLSFISIFLNLGVFFKVLFGVISIVALTWKMKGLLLFASFALIMMLGCAYVTRKNRQFIDGKLEQNEANLQKTV

SEQ ID NO: 5329 - protein, 138 aa, Enterococcus faecalis
AIFNRKTIIKKTKEKQEIRKGCQENFIDKAFIPLYNSFCCLGVIIMKWSLLELNKYKEEPLVFSETLHLKEELLQRDDTLLDVSPIKVEGLLAVNKSEYLLHYTIQVTVTVPSSRSLEPVALPMQITVEEVYTTGMGE

SEQ ID NO: 5330 - protein, 114 aa, Enterococcus faecalis
SVSKLVQGQGVGEEAIIAKAVVAATAEEAVAKATEGAILVTKTTDKEYMPAIEKASALVVEEGGLTSHAAVVAIAQNIPVIVGAADATSLINNDEVITVDPRRGIVYRGATTAI

SEQ ID NO: 5331 - protein, 491 aa, Enterococcus faecalis
LILLALYKQIWNRSVLVMKKTKIVCTIGPASESVDMLVNLINAGMNVCRLNFSHGDYEEHGARIKNIREAVKITGKRVAILLDTKGPEIRTNDMENGAITMKIGDSVRISMTEVLGTNEKFSITYPELINDVNVGSHILLDDGLIDLEVTDIDRDANEIVTVVKNEGVLKNKKGVNVPGVSVNLPGITEKDANDIRFGIGQGIDFIAASFVRRASDVLEITKILEEENATHIQIIPKIENQEGIDNIDEILKVSDGLMVACGDMGVEIPTEDVPVVQKALIKKCNALGKPVITATQMLDSMQRNPRPTRAEANDVANAIYDGTDAVMLSGETAAGDYPLEAVQTMARIAVRTEETLVNQDSFAWKLYTKTDMMEPFGHFVAKTQGNWGIQTFVAATESGHTARMISKYRPKAHIVAITFSEQKARSLSLSWGVYATVADKPSSTDEMFNLASKVSQEEGYASEGDLIIITAGVPVGEKGTTHLMKIQMIGF

SEQ ID NO: 5332 - protein, 321 aa, Enterococcus faecalis
RMKRIGILTSGGDAPGMNAAIRAVVRKSIFDGIEVYGINYGFAGLVAGDIRRLDVADVGDKIQRGGTFLYSARYPEFATEEGQLKGIEQLKKFGIEGLVVIGGDGSYHGAMALTKRGFPAVGIPGTIDNDIPGTDFTIGFDTAINTVLESIDRIRDTATSHVRTFVIEVMGRNAGDIALWSGVAGGADEIIIPEHDFDMKNVAKRIQEGRDRGKKHCLIILAEGVMGGNEFADKLSEYGDFHTRVSILGHVVRGGSPSARDRVLASKFGSYAVELLKEGKGGLCIGMLDNQVVAADIIDTLENNKHKPDLSLYELNHEISF

SEQ ID NO: 5333 - protein, 1126 aa, Enterococcus faecalis
ENRRRGKNSKDSKRSCPMSFPQLHTVTSYSLLSSTVRIRSYVKQAKALGYQTLAITDINVLHGAVEFYEACQEAGIQPIIGLRLEYTPAEKEGHSELLLFAKNLKGYQQLMQLSSSKMTTEGPFYLAEHQSLLSDLFAVTLSAKGEVAQTFFEDEQQAVHAFQQLASYFDPQSLFVEHSFSMNQQRNPALFSFYQREQLPGVALQEVRHLTREEGFAVTVLESIKENNQLNITSQTPEIEGLNYLREAETTMEQMLQIAGAEVVQNTIQLAENCRVDIPLHQKLLPHFPVPDNQTAGSYLRTLCLEKLPERVPHLNEVYQKRLEKELTIIHNMGFDDYFLIVWDVMDFCHNNQIVTGAGRGSAAGSLVSYVLSITDVDPIKYDLLFERFLNPERYTMPDIDLDIPDNRREEVLAYVSQKYGHYHMAQIATFGTMAAKMVLRDVARVFGLSQSEANRWSAAVPNKLKITLEEAYQESKRMQELVNFSPNNQLLYKTAVQLEGLPRHVSTHAAGVVISDENLLNLVPLQPGSNEILLTQFTMNDVEKIGLLKMDFLGLRNLSIIDDTLTAVKRVYNRTIRLNQIPLDDETTLALFRKGETSGVFQFESAGIRNVLRKLGPTSIEDIAAVNALYRPGPMQNIDVFIRRKKGLEQISYPEPSLAPILENTYGIIVYQEQIMQVAAKMAGFSLGQADILRRAISKKKKDVLDEERNHFVNGALQQGYPQETANQVYDYIERFANYGFNRSHAFAYSFIGFQMAYLKVHYPSAFYVALLHSVRHNPTKIKEYIGEARKNKQTILQPSINQSHYSFYLNQQQQILFGFSSLKGIRRDFIQNILNERRENGPYKTFDEFLLRIDRKWLKVENIEPLIAIGAFDEIAPNRRQLAVGLESNIQSILLSGGSMDLLETLKPKEEEIADYPLEERLEQEEQYLGVYLSGHPTEEFKKTRLAKQTQLVHELVENQPTKLLIYVKNIRTIRTKKGEQMAFVDGDDTTGSISLTLFPTVFRQLRQSVEKGQVYYVEGKVERSTYNQELQILVQRIEKAQQVETSISDETCFIRITKDVEQTDVFQKMKEVLSRHAGHIPVIVYFEKTGKKIVLNEENWVAHTSASQQQLAYVLGEQNVIFK

SEQ ID NO: 5334 - protein, 66 aa, Enterococcus faecalis
KRGAHMRYLVVFFWTFALGQVVGYIGGALSGGSYDFKMTTILSLATAVIILLIAHFAVPKETKPVK

SEQ ID NO: 5335 - protein, 402 aa, Enterococcus faecalis
RGNCEYGEGDETLGIFGHMDVVPAGDGWETDPYEPVIKDGKIYARGASDDKGPSMAAYYAMKIIKELGLPVSKKIRFVVGSDEESGWGDMDYYFQHEEAPDFGFSPDAEFPIINGEKGNVTIRLTFRGGNGADYKLESFKSGLRENMVPGTADAVVTAASAHKAASLAASFETFIKQEAKISGNAELSDKTVTFHVVGKGAHGASPQSGINAATFLATFLNDYSFAEGAYSFINTIAEFIHEDFYGEKLGVAFEDEKMGKLTMNAGIVNFDPENPENSLVTLNFRYPKGTSAEELQAKVQTTVGETVTATQGDRNQEPHYVPVDDPLVATLLQVYEDHTGEKGQEQIIGGGTYGRLLKRGVAYGAMFPGYTDTMHQANEFMELDDLFRAAAIYADAIYRLAK

SEQ ID NO: 5336 - protein, 82 aa, Enterococcus faecalis
IGENAMSETLIVNYLIKGRVKMNVEELVQKAKDLIGEGNVEHAQQFIEEHKDELGEHYHKITAMLADTTTDGLFDKIKGLFQ

SEQ ID NO: 5337 - protein, 63 aa, Enterococcus faecalis
LQKPSRYDDFICSCFTVKHCNSRRLTVFERGAKIQSDFCPTLFFFYLTFNHCFGNTYAIGLKR

SEQ ID NO: 5338 - protein, 352 aa, Enterococcus faecalis
TKVNCFLLKGVIVMENDKRIYKWDNVKLFLIFLVIFGHILDREASPSRLMETINFWIYSFHMPAFIFVSGLFSKHAIKQRKYLRLLSFVWLYLLAKLLITLANFAFANKMNFDLLNETGVPWYLLSLASFYLITIFLQRVQPKIMLPIIIVIGCASGYLPVEGFLSLGRTLGFFPFFYCGYLMDIQKLQTFLDHRKVKWAAIGVILSSFLFVNSQWSLATKFWGFLTGWASYAEISPAFEYSSFIQLFFYVAAALVSLSWFALLPKRKLPLSALGKDTLYPYLLHMPLIILLESGLQLDTLFKEWFTFRILALFFLALFILAITNMPVVKRGADYLFNPIAYVLPKQWLKVK

SEQ ID NO: 5339 - protein, 317 aa, Enterococcus faecalis
MIKIQNVSKVYQENAVLSDVNLTIQQGEFFVLVGPSGSGKTTTLKMINRLIEPTTGEVALNEQAVTNYPLRELRLKIGYVLQQIALFPNLTVAENIELIPEMKKWPKEQRRERTIELLKKVQLDPEEYLHRKPAALSGGEQQRIGILRAIAAEPEVILMDEPFSALDPISRHHLQRLVKELHQELASTIVFVTHDMNEALLLGERICIMDTGKIIQVDTPEAIQKHPKNNFVGQFFKQSSPELANYCGADLTAFLEAADETIEPVPTVFMETNLKEIVQLINAQEKANLVEKQQVLGCITSKTITRFMEQLLESEGQ

SEQ ID NO: 5340 - protein, 505 aa, Enterococcus faecalis
MQALIETFFARKEEYLQALIEHMQLSFISLLFAALIAIPLAIYLTSHRKLAESLLQVTGIFQTIPSLALLGLLIPLIGIGRPPAIVALVIYALFPILQNTYTGLTEIDPSLEEAAEAFGMSKKEKLFKFELQMALPFIISGIRTATVLIIGTATLAALIGAGGLGTFILLGIDRNNLSLIFIGALSSAALAVLFNYGIHWLEKANGRRLIIGGTILGLLLGGSFFWNQQTSSKEKQLTIAGKLGAEPDIIINMYKALIEENSDIQVTLKPNFGKTTFLYNALKSDEIDLYPEFTGTVIETFLKNPPQLDNQPQVVYEAARAGLKKQENLTLLKPMRYENTYAVAVKRSFAKAHQLKTISDLQKISNQLKAGFTLEFIDRQDGYKGLQEKYHLNLNVQSMEPALRYQAINNGEVNVIDAYSTDSELRQYDLVTLEDDQALFPPYQGAPLIKTATLEKYPELAEILNKLAGKISEEEMSEMNYQVNVEGQDPSIVAKDYLKEKNLLK

SEQ ID NO: 5341 - protein, 73 aa, Enterococcus faecalis
KVPVFLLIFGYNKRYEWRGVVYMKKAERQRLIKQLIMQQEIETQDELITRLEEIGVRATQGTVSRDIRENEYC

SEQ ID NO: 5342 - protein, 103 aa, Enterococcus faecalis
VLLKHMVQMVVSNMQFFSQAQGTSSEEKLRESVKDSVVRMERVQFIVILHTEMGNADVVSNFLDEVAFPEVAGTVAGADTIIVITRSEEDAEHFIERIENMIF

SEQ ID NO: 5343 - protein, 520 aa, Enterococcus faecalis
KGVFFLAELKALQNGSDIRGIALDTEEQTATLTATAVAEIAVGVVRWLQDKKQLPRKAQQRLTIAIGHDSRLTAEPIKQALVDTFLSLGIQVIDVGLATTPAMFMATQFPTLQCDAAIMITASHLPYYFNGLKFFTAEGGAEKEDIRYILSHTDPLTANENGTLMKQELLPIYAEHLVEKIRQGIHSPEEKPLQGFRIIVDAGNGAGGFFAEQVLQVLGADTTGSQFLEPDGHFPNHVPNPDNSEAMKSIQTAVLANQADLGIIFDTDVDRSAVVDQSGEVLNRNNLIAVLAAIVLKEAPGSYIVTNSPTSSHLKTFIEEKGGQQIRYISGYRNVINKMIELNHGGFQTPLAIETSGHAAFQENYNLDDGAYVVAKILMLLPELKQNNQTLGDLIATLKQPAETNEFRFKITAEDVTCYGQQVLRDFELFVENQADFAVDRENQEGVRGNVSGQYGSGWFLLRLSLHEPLLVLQVENDQSDKNACVIEKIATFLQKYEEIDSQQIEKYSRKLKCFLWKMF

SEQ ID NO: 5344 - protein, 198 aa, Enterococcus faecalis
  MISC_FEATURE (26)..(26): Amino acid 26 is Xaa wherein Xaa = any amino acid.
SANRKILSEIKVFLMENVLKGKHVGXSHFREGYIEHIAKQQWDNELLRHLSWDALHPWGLEEWKDFTINKGEDDRFLFAILENTTEEFIGWVSLSDVQLKNRGANLGIAILQKEQRGQGCGFEAVSLICKFAFYELGLHKIRLAVNSNNQKAIHVYEKVGFKKEGIDREALFQDGQWLDIYNYGILQKEWLQMIKAES

SEQ ID NO: 5345 - protein, 201 aa, Enterococcus faecalis
RGPLMIVNKPYGIKTHPNQPQETDTLLNHVAAYLAEKNQVPYVVHRLDKETSGAIVFAKNPFVLPILGRLLETKQIYRQYQAIVAGHFSQKEQTINQPIGRDRHDRRKRRIDPQKGDSAITHVQVVQALSNNQTAVTCVLETGRTHQIRVHLASEGHPIIGDPLYNPKSQAARLMLHASQLHLLHPFTKKQIVVTATPGLW

SEQ ID NO: 5346 - protein, 782 aa, Enterococcus faecalis
TYDILKMCRNIQAFVCYSLVFYAKVIQAQKKAGDFMKHIKNTWELFILDWKRIFKNPVATFLIVALMIIPSLYAWFNIKALWDPYSNTGELPIAVYSDDQTATFQDKSVNIGDEVLKNLKKNKQLGWRFVDSKKELDKGVQSGKYFAGIYLPKDFSKDLLSFTSGDINKPKIEYSINEKINAIAPKITSKGASSIQSQISEEFIKTASSTLIKTFNDIGYDIDKNMVSIQKVKSMILDTDANIGTIDTYAKQVTDLHGKMPELKEKLAKANDAMKYLPEVDALGEKIVELNGKMPSIKEQASVILTLQEKIPEIQNAGRQIAMIDEDFASVEQTMSEGIQEAKQGLEIIQQVQTALPDIRKLGDQANDLGNVTLDGATQLEKALPGITQSVGTILKAIGTISAGVNTALEDLKNHRLPVEEREAIKQQLSESLGKQHENIQQLIQLFTQIQEATGNTDLQDTINRLNTIDGIVVRLKTDVDNIDVNAVTDADLNAIQAEAQQVEATVNSINPDAIENTVKTILDKLIATIQNAQGQLNKAQQIDFEGLLSSTSQTVTNAISLLEKYQAEMPAIKQEIHDANTMLNGNMETIVNGINRGADLYKNDLPVIQDKVSKAAAFMQNDYPGIRKDLTNTLKTVNEKMPDVEAALDKANELIINDWPNIKTGLHKAANAIRKGEKEVDLGEILKLLKLDANKESDFFTQPVEVKEHAVYPIANNGSASTPFYTALCLWVGAVLFSSVATTDVYLEGKDKKRFSKREQFSARMFTFIFRQDAQHNSRGL

SEQ ID NO: 5347 - protein, 77 aa, Enterococcus faecalis
GMKEGQEQFLTFILDRTKEDKKEKMQALLAEMFERQQTGKLDKMYLMTKAPKLLAYLKPEAIDEVKQVVSEFSKNMK

SEQ ID NO: 5348 - protein, 244 aa, Enterococcus faecalis
  MISC_FEATURE (233)..(233): Amino acid 233 is Xaa wherein Xaa = any amino acid.
NMNSVVNFRDIGGFPTQQGTVVKTGYFFRSGELVNVAQADQQKLVEDYQIKRIYDFRSAAETQERPDDSIQGTNYLHIDILADIQAQTASLEGMLKTVGSPDEAMDMAYKEMVLSNSGRKGYQTFFENFLSYPQEAILFHCFAGKDRTGIGAALILSALGVEHSYILEDYLKTNEQRKTANEQIIAQYQANGTPLAEIQQLETLLYVKKEYLATALQAIETEFGSVEGYLKEXLGLLYPPKKTC

SEQ ID NO: 5349 - protein, 494 aa, Enterococcus faecalis
VTMLKRDFLEKPYDYMNDILLFLYNNKGQATRNELVDFFNISLPTLNEYLSFLEQFLKEEQLQENLTLTVLGDTLYLNKAPTFSMKAMIMLFLDKSIKFHMVQQLFHKNEINGGYFQQNYAISSAIYYRKIVELNDLLNEFNLRIKRGKLVGEEKQIRFFFFNFFWFIFEEKTDLEKELANQYLGLIEILQEIPRITFDHTEILQIKLWMKISFRRMVLEPLPTISPHDVQLDRPLFEEINLSIHTYMKRIDRPYTINEAYMFYDFFCSMHNYSANAAFAFRLAKQQRIEKTYLNEMNRVILTYLKARGYLSHYVLPIRLLYIENLLFQLHAQLYYFSGFILPFDYWTIQSLLKVLRHPFSESEVYELVEIATTNFATKATASKYQNQFTEINYTLILNHIAELNEKKITIGVYHSLSSAYSELVAQKIQQSIAGKYPLKIEPYNAENHYDLLLMNTNNEQLVAQYDHYYIFSDISNRYDLQSIEKIIQLLLGR

SEQ ID NO: 5350 - protein, 197 aa, Enterococcus faecalis
EAFPFKKTMEEWIKPVMRTIRHIKRAFLKQKLPATYQLKKQKANTAMEYLLEQTDNHQSIRGPKRKMTAEEIKKKRQAYQKKQRVQVVKFFMPAILFAIFVFFFVLKTSSYPIAGQSMKPTLNAGERVLLQRTKQVARYDVIAFKAPLASKGTYVKRIIGVPGDRIWVNEGKLYLSEEPIASDNDALPENASRFDLS

SEQ ID NO: 5351 - protein, 110 aa, Enterococcus faecalis
HVLNKITINKMVSKKLTGARKLHCLGVLFLAVTLSSSAERLQAAAVSKEEQSLRQPLIRKNIVTEKSEYLVEANQSIWELAQDAQKPLNQFMKENQLRSSYIKKGTQLVK

SEQ ID NO: 5352 - protein, 431 aa, Enterococcus faecalis
MTKRRLIRKIKDISDDTLEKEVFFQPGFEPEKIISGIKPEQQEKEMATLRERLTYYQKKETAFKKLQEENEQLKNQQETEKQALEEKNQALLETLNQKEHEIFELEEQLETNSETTTEATTLQTNLQNAEKQLTTVHNQMERLESELTQQVAELEKESAEQQQHIQTLHNQLAEEKGKLEKKGDITGMEKQVETLTTELEESTTTQQALQEQIEKLTVQLQKVEAEKQTLQEAVQQEVIVKQRMEELKNELQNSLQQKNEAEVKLGRLQGVNDKHLAEKQVYEGELAALRKEVEAKEDNLEQVQKELKTLQAVSKNIEPSSEQLTELLRAKQQINDLLMKNQQLQEEALKSQQEIGEVMVSAKKEANRIVNEAKVEAKHLINSAELEMLNIGNRAKSISNEVEASKVEVLEIYRELEERLTKLTRLEQDNY

SEQ ID NO: 5353 - protein, 80 aa, Enterococcus faecalis
GPDFQPDTVSALGGGSAMDAAKGMWMFYEHPNTEFFGAKQKFLNIRKRTYKIAKPEKNTICLYPNYFRNWFRSYTICRYY

SEQ ID NO: 5354 - protein, 284 aa, Enterococcus faecalis
ISANGHIKLPNQKKTQFVCIPTTSGTGSEVTPFAVITDSETHVKYPLADYALTPDVAIVDPQFVMSVPASVTADTGMDVLTHAIESYVSVMASDYTRGLSLQAIKLVFDHLENSVKRPDMESREKMHNASTMAGMAFANAFLGICHSIAHKIGGEYGIPHGRTNAILLPHIIRYNAKDPSKHAMFPKYDYFRADTDYADIAKFLGLKGNTTAELVEALATAVADLGKSVGIDMNLKAQGVSQETLDTTVDRMAELAYEDQCTTANPKEPLISELKQIILDAYVG

SEQ ID NO: 5355 - protein, 373 aa, Enterococcus faecalis
LLGKKTELPHCHFTSIPMVKRSVRRSMNRKDEHLSLAKAFHKEKSNDFDRVRFVHQSFAESAVNEVDISTSFLSFQLPQPFYVNAMTGGSQRAKEINQQLGIIAKETGLLVATGSVSAALKDASLADTYQIMRKENPDGLIFANIGAGLGVEEAKRALDLFQANALQIHVNVPQELVMPEGDRDFTNWLTKIEAIVQAVEVPVIVKEVGFGMSQETLEKLTSIGVQAADVSGQGGTSFTQIENARRKKRELSFLDDWGQSTVISLLESQNWQKKLTILGSGGVRNSLDIVKGLALGAKSMGVAGTILASLMSKNGLENTLALVQQWQEEVKMLYTLLGKKTTEELTSTALVLDPVLVNWCHNRGIDSTVFAKR

SEQ ID NO: 5356 - protein, 370 aa, Enterococcus faecalis
ISMIEVTTPGKLFIAGEYAVVEPGHPAIIVAVDQFVTVTVEETTDEGSIQSAQYSSLPIRWTRRNGELVLDIRENPFHYVLAAIHLTEKYAQEQNKELSFYHLKVTSELDSSNGRKYGLGSSGAVTVGTVKALNIFYDLGLENEEIFKLSALAHLAVQGNGSCGDIAASCYGGWIAFSTFDHDWVNQKVATETLTDLLAMDWPELMIFPLKVPKQLRLLIGWTGSPASTSDLVDRVHQSKEEKQAAYEQFLMKSRLCVETMINGFNTGKISVIQKQITKNRQLLAELSSLTGVVIETEALKNLCDLAESYTGAAKSSGAGGGDCGIVIFRQKSGILPLMTAWEKDGITPLPLHVYTYGQKECKEKHESKR

SEQ ID NO: 5357 - protein, 359 aa, Enterococcus faecalis
KDRTNHCTDFRRKWSCCYMDSIIRGEKVMLSGKARAHTNIALIKYWGKANEEYILPMNSSLSLTLDAFYTETTVIFDAHYSEDVFILDGILQNEKQTKKVKEFLNLVRQQADCTWFAKVESQNFVPTAAGLASSASGLAALAGACNVALGLNLSAKDLSRLARRGSGSACRSIFGGFAQWNKGHSDETSFAENIPANNWENELAMLFILINDGEKDVSSRDGMKRTVETSSFYQGWLDNVEKDLSQVHEAIKTKDFPRLGEIIEANGLRMHGTTLGAVPPFTYWSPGSLQAMALVRQARAKGIPCYFTMDAGPNVKVLVEKKNLEALKTFLSEHFSKEQLVPAFAGPGIELFETKGMDK

SEQ ID NO: 5358 - protein, 186 aa, Enterococcus faecalis
PNPVGNSSEKIAHGRPSGIDAAATSGADPLFFTRGFPPTHFSMNLSNAYLVVADTGIKGQTREAVKDIAQLAQNNPTAIAETMKQLGSFTKEAKQAILQDDKQKLGQLMTLAQEQLQQLSVSNDMLDRLVALSLEHGALGAKLTGGGRGGCMIALTDNKKTAQTIAQTLEENGAVATWIQSLEVKK

SEQ ID NO: 5359 - protein, 398 aa, Enterococcus faecalis
RNLQSVKKAAKDRVVPPCPVYETCGGCQLQHLAYKAQLDFKKDLLKQALNKFKPANYQNYELRKTIGMDNPWNYRNKAQFQLRQIDGQVEAGLYQADSHQLVPIDNCLVQQPATTKVMNTLVDLLNDFQLPIYDERKNSGIFRTLMVRVGIQTGEVQVVFITQSQKFPQKEKMVRAINEQLPEVVSIMQNVQNKKTSLVMGDDTLHLWGKESIEEHINDVVFDLSPRAFFQLNPEQTEVLYNEGIKALDLQPNETVVDAYCGVGTIGLSLAKQAHQVRGMDTIPAAIDDARFNAKRLGVTNTHYAVGTAEDLLPKWFKEGFKPDAIVVDPPRTGLDRKLLTALLKQPPKKMVYISCNVSTLARDLVQLAKVYQVDYLQSVDMFPQTARCEVVVKLTRK

SEQ ID NO: 5360 - protein, 142 aa, Enterococcus faecalis
IKAQNSALRSPVLSFFNEIIRNYCFFFMEISKLFCYLIKIVHNSNIANYSLDKAFRRNYFMHTLWVLIVGAVIGAIAGALTSKGQSMGWIANIVAGLVGSFIGEKILGSWGPHVAGMAIVPSIIGAVILVAVVSFFFGRKNS

SEQ ID NO: 5361 - protein, 1053 aa, Enterococcus faecalis
LSLWALLGFVGNDMKQKKKMKLVKEKWIMKTWENYKVDSINRLPGRAHFSSFPSKETALLNENKYTQAYKNLNGCWHFLFLEAPEYSPENFFATDFDTSQMDQITVPGNWQVQGYGKMHYSDLWYNFPINPPYVPTENPTGIYKRTFAIDETFHDKKIILRFCGVDSAYHVWVNGHEVGYSKGARNEAEFDITPYAKIGETNDLTVRVYQWSDGTYLEDQDMWWLSGIFRDVELLGVPENGLEDFFIISDLDDSYQNGHLAITGKFWQDKGQQVQLELMDQQGKTVLKETVAGNQGTVEFSASLPSVTAWSAEKPYLYQLFITVFSEGEVVEVIPQKVGFRNIHVSGETFLVNGVAIKLKGMNRHDYNPKNGRVVSREEIEKDIRLMKQFNINAIRTSHYPASAYFYDLCDEYGMYVIDETDLECHGFELTGEYDWISNDPEWETAYVCRMVRLIQRDKNHPSIIFWSLGNESAFGHNFIEMARIAKEMDPTRLVHYEGDFEAEVTDVYSTMYTWLEHPTRELLMNTIIENSKKPHILCEYCHAMGNGPGNLKEYQELFYAHDKLQGGFIWEWFDHGIESVTDNGEVYYRYGGDFGDDPSNKDFCIDGMLMPDRTPSPSLYEYKKVIEPITTSAIDVLSGEFSLLSRFDFENLAIFKLVYTITEDQTVIQSGTVAVPAIAARAEGRLHLPYHLDFPKKAGAAYYLTLSYQLKETTAYASAGHELATAQFELPIATPGIEITPVGSLMAKEIGPHLYIEGPNFSINFDKVKGALTNVTRDGKKLLHKGPKFTFWRAPISNDMEIIDEMKKKYFLHLEHEIVRSFEWKKVDDFIQVIVKTINGTTNSAWHYQCTYQYLIAPNGEIFFDLKGSPAGKIENAPDMLPRLGVTLHLDKSLSEVKYFGKGPRENYVDSQEAGLLGVYDATVAEMFTNYVVPQANGNHMATKWSAFTDDRGQGVVATAADSYNFSVSYFEEQALDVAKHTNELQESEYVVLNIDYKQNALGSYSCGQWQLEKYRTTFEEFQLAFRLTPFNNKEIQAADVAHERVKRPTIS

SEQ ID NO: 5362 - protein, 511 aa, Enterococcus faecalis
VLINLIKRGCSKMATHSRERLGSVALMLMTFSAVFAFPSIVNNSIQIGLATIPGYLFGSIFYFLPFILMIAEFASANSENESGVHSWLESVLGPKWAFLGAWSYFFVNLFFFCSLLPNTLIYGSYAFLGQNVFQGNHSTNIIAVISILLFWLMTWVCIKGVSWISKVTSLAGGARLFMGVAFVVLAFVVVFGFGNEPAQEFTTTSIMPTFNWTFFMTMAWILQAVGGGESIGVYIKDVKGGNKTFVRTIIGATIAVGIMYILGAVAVGLVVPTDVLKGNFSNGIFDIFKILGTYFHIPAAMMVRLVGIILFVGSLGSLALWTAAPVKVFFSEIPDGVFGKWLVKTNEEGNPTNALLVQGIIVTILVAIPALGIGNMDSFLETLINMTASTSLVPVLFLLIAYIGLRWKKETMPRSFRFGNRTFGLIAGIFLLAIFIFVFFMSTVPDPKLIMEEINCTLPKGTASPLGMLAYNIIGLIVFMGFAWICWKRYETKEKNEVGKGEMDYEDLGKL

SEQ ID NO: 5363 - protein, 280 aa, Enterococcus faecalis
RGDSMQNVFTNNVSILINDQPISQEFHLYEAGYEKCRPTKPTEFAPINYWVLHYCSDGEGYFSTPFMEKQHITAGDLFMIPANCRNIYYPNRQNPWTYHWVGFVGDLSSQYLEKIGLTTENCILKGTVDKKLESLFKNIYQEAKKHNHFGSLSESFQLLNYLEHHSVTQHENQSQQLFNQIKMAIHENFSNNLSISQLASEYNIDRSYLFKLFQRYEQTNPSIYVQNLKLQKACSLLRKSSLTITEISFETGFSSPSYFSKFFFQKKEMTPRQYRQQFLT

SEQ ID NO: 5364 - protein, 148 aa, Enterococcus faecalis
VTKGMIKMKKMFLGLFCFVSITTLSVSNVWAEDSANEASVEKSTVTSLTQETSATTINASTDSTALTAESEELPSLRQTLLNYVGMYGLTETLINRLSDDELDYAKKVSFHFVNQDISGTARMITKLYGEKPIPEDSYFTDYSTLTIR

SEQ ID NO: 5365 - protein, 326 aa, Enterococcus faecalis
IVEKLMADIPYNINIMDERGKIIASGDSARIGERHRGAERAINERKNIEIYKDTSLEKKGTNEPIILNNHILGVVGISGEPDEVRKFTKLVRSIVLLLTEELNTQQEREKKKKQKNQFIQHLMHVDSAYSEALKLEALELYNLQLDDQNHCVLTKDKRLLSSYYPGHEIFEWENCYLVITSEPPQITKPVTEYLVISSEKATIQQMVQEAQNTYLLLSFLQLEKAKFYQAEDFFIQGIFNFPFHIELDFFETIQTIYDEYYETVIFFANHNLNINETSQVLHIHRNTLNYRLKRIHELTGMDPKVWQDFWKLFYYFAYCFKERFEK

SEQ ID NO: 5366 - protein, 304 aa, Enterococcus faecalis
GVVPVKKAVLIVNPSSGGEKAKEFETLAEEKLKQLFDEVVVKQTEKGGDAEQFAREAAESHFDSVFVMGGDGTVNEGISGLAEQAYRPKFGFFPLGTVNDLARALNLPMDPEEAIQQLDLEKTSALDVGKINDDYFMNVVAIGTIPESINDVDVEQKTKLGKLAYFISGAKHLANAQTYPFHLSLDQKEQTIESSTVLVGLTNSIGGFETLLPEAQVDDGKLHLVYLKDQSLWDAVKAVPDLLKGVDQSTDNLVYLTFKEGTISLENQEELTTNVDGDEGAALPITLKILPKHLTVYCGEEQTK

SEQ ID NO: 5367 - protein, 270 aa, Enterococcus faecalis
KTDKFWLFKSSKRESIRGYAILCFYILIDKGVNEMRRKKHKNKKKQELFEEIEKQELAEQETKQLNEEIEDPEFRSFFQDVLKKFPQKTSTAIMNAFATSKGKAEQLVTNSQTQLDKVFDEFLAGVSPDVKKKSHQTIHFAALSAAIIGFSPIPFSDAFLLVPVQLTMMSRLHKIFGQSWSESLGKSLTKELVVVSLGKSAVGNILKVIPVVGTVTGGMVNASVAVAITEALGWVTVKMLNDGVDIFGDVMSFKGQFSTLFKAIQNAKKK

SEQ ID NO: 5368 - protein, 571 aa, Enterococcus faecalis
TNMNKYQLPVASWVESFTDWLTSTFAGLFSFLQTIGQSVMDNITALLTAVPPLVLIVLLTIAAFFISNKKIGLSLFTFIGLMFIYNQNLWNDLMSTVTLVLLSSVISIIIGVPLGILMAKSEKAKSIITPILDFMQTMPGFVYLIPAVAFFGIGMVPGVFASVIFALPPTVRFTNLGIRQVPNELVEAADSYGSTGWQKLFKLELPLAKNTIMAGVNQTTMLALSMVVIASMIGAPGLGRGVLSALQRAQVGNGFVNGVALVILAIIIDRFTQHLNNKKAAPKAAGATSKKKKYGIIAAVVVIVAGLVGASIFTTTNDKQISLSYVEWDTEVASTHVVAEVLKDMGYDVKTTPLDNAIMWESVAKGETDAMVGAWLPGTHAEQYKQYKDKLDDLGENLKGAKLGIVVPSYMDVDSIEDLSDQAGKKITGIEPGAGVVAAAEKTKEAYPNLKDWSVETSSSGAMTVALGQAIKNNEDIVITGWSPHWMFAKYDLKYLADPKGTMGGEKAIHTMARQGLKEDQPEAYKVLDNFHWTTKDMESVMLEINEGKDPQEAARDWVDSHKDQVAEWKK

SEQ ID NO: 5369 - protein, 373 aa, Enterococcus faecalis
  MISC_FEATURE (12)..(12): Amino acid 12 is Xaa wherein Xaa = any amino acid.
GAHQRPNRKFLXKTVATVGVYDVNFEVEEGEIFVIMGLSGSGKSTLIRLLNRLIEPTSGNIYIDGQDISSLDKEGLREVRRNKMSMVFQNFGLFPHRTILENTEYGLEIRGVPKEERQAKAEKALENSSLIAFKDQLPSQLSGGMQQRVGLARALANDPEILLMDEAFSALDPLIRREMQDELLDLQENVKKTIIFITHDLNEALRIGDRIALMKDGQIMQIGTGEEILTNPANEYVRTFVEDVDRSKVLTAQNIMVPALTTNIEIDGPTVALKRMRQEEVSMLLAVDKKRQLKGVVRAEKALEARKNGTSLVECVDPEIQTIDKDMLVNDIFPLIYDAQTPLAVTDNGKLLGVVIRGSVLEALAETEVNEHE

SEQ ID NO: 5370 - protein, 265 aa, Enterococcus faecalis
PDYLVNTVLLAIRVIVDSIKDCYAVLGAIHTRWTPMPGRFKDYIAMPKANMYQSIHTTVIGPKGNPVEVQIRTHEMHQIAEFGVAAHWAYKEGKAEKIETDELTKQVDWFHEIIELQDESYDASEFMQGVKEDIFSDKVYVFTPSGDVTELPKGSGPLDFAYSIHTEIGNKTTGAKVNGKMVQLDYVLKNGDMIEVLTSPNSFGPSRDWLKMVKTSKAKNKIKRVFKEQDREDNIIKGHDAVIKYMTEIGFTPKRILTKNEMAEV

SEQ ID NO: 5371 - protein, 84 aa, Enterococcus faecalis
LFYFALIVEMTSFLLMSHHISKLLTSFLRGAVCNIRIDRLRYFSIYVDESIPNDKQAISEAIERLKELIYLFRRRARRLYHPSA

SEQ ID NO: 5372 - protein, 262 aa, Enterococcus faecalis
INVENTGQFERTLIIVDEGASVHYVEGCTAPTYSSNSLHAAIVEIFTRKDAYCRYTTIQNWSDNVYNLVTTRAKAYEGATVEWIDGNLGAKTTMKYPSVYLDGKGARGTMLSIAFAGANQIQDTGAKMIHNAPNTSSSIVSKSIAKDGGEVNYRGQVTFGKDSAGSISHIECDTIIMDEKSKSDTIPFNEIHNSQVSLEHEAKVSKISEEQLYYLMSRGLSEAEATEMIVMGFVEPFTKELPMEYAVELNRLISYEMEGSVG

SEQ ID NO: 5373 - protein, 175 aa, Enterococcus faecalis
RKGDDELSTVPELEEYKFGFHDDVEPVFSTGDGLTEDVVREISRVKGEPEWMLDFRLKSLEQFNKMPMQEWGPDLSDIDFSKIKYYQKPSDKPARDWDDVPDKIKETFEKIGIPEAERAYLAGASAQYESEVVYHNMKVECGKLGIIFTDTDSALKVYPDLFQGVFFKTFCHPTE

SEQ ID NO: 5374 - protein, 167 aa, Enterococcus faecalis
LKRLKRQRSFSSMALSKLDNLYRQVILDHSSHPHHHGTLDASSQTIELNNPTCGDVIELDVAIEDGVIKDIAFQGSGCSISTASASMMTDAVLGKTIAEATALAEDFSQLVQGNEVAEDEKLGDAAMLSGVAKFPARIKCATLAWKALEQAVANNGQGEAGHLHCEK

SEQ ID NO: 5375 - protein, 416 aa, Enterococcus faecalis
REVKRMMDAATIRQSFPILFQEVNDEPLVYLDNAATTQKPTAVLDVLRHYYETDNANVHRGVHTLAERATKDYEASREKVRQFIHAKETAEVLFTRGTTTSLNWIAKSYGDLAVTAGDEIVISYMEHHSNIIPWQQLAQRTGAILKYIDVTEDGFLDMASARQQITEKTKIVSIAHVSNVLGVINPIEELTQLAHQNGAVMVVDGAQAVPHMPVDVQAIDADFYAFSGHKMCGPTGIGVLYGKRHLLEQMEPVEFGGEMIDFVHLQESTWKELPWKFEAGTPNIAGAIALGAAIDYLTEIGLEAIHQHEAALVHYVLPKLQAIEGLTIYGPQDPKDHTGVIAFNIEGLHPHDVATALDMEGVAVRAGHHCAQPLLNYLSVPATARASFYLYNTKEDADRLVEAIKATKEFFQHGTF

SEQ ID NO: 5376 - protein, 428 aa, Enterococcus faecalis
MKKVNLMDYLDEVTAFSLEHEEPAWMTELRTTALRNADESELPHIDRVKFHRWPLLNVHMESYVPSEGNVASFDQMKDNPLIVQQGSFHAFEQLPASLAEQGVIFTDIFTALQEHPELVKEYYMTKAVLPEEDKLTAAHAAFMNSGVFLYVPKNVVIEEPIESLFIQDSDSNQPFFKHVLIVADNHSEFSYLERFQSTGHHAEKASGNIVVEVIAKDGAKVKYSAVDQLGQTVTTYMNRRGYIMRDASVDWALGVMNDGDVVADFDSDLVGEGAHSEVKVVAISAGKQTQGIDTRVTNKAPHSIGHILQHGVIRERGTLTFNGIGHILKGAKGADAQQESRVLMLSDKARGDANPILLIDENEVTAGHAASVGRVDPEEMYYLMSRGLRKEEAERLVIRGFLGSVITAIPVKEVQNEFVEVIEGKLNA

SEQ ID NO: 5377 - protein, 274 aa, Enterococcus faecalis
AKMSENGKTIKTSWRELYMSVLEIKNLHVSIEDKKILKGVDLTINTGEIHAIMGPNGTGKSTLSAAIMGNPNYEVTEGEILFDGVNVLDLEVDERARLGLFLAMQYPSEIPGITNAEFMRAAINAKRDEDNKMSVMQFLKKLDSKMELLNMPEEMAERYLNEGFSGGEKKRNEILQLLMLEPTFAILDEIDSGLDIDALKVVSKGVNEMRGENFGALIITHYQRLLNYITPDVVHIMMEGRVVKTGGADLAKRLETEGYAGISQELGIDYQEEA

SEQ ID NO: 5378 - protein, 87 aa, Enterococcus faecalis
SSLHKEKNSGRIKKFIKESVFLNNYFRMTFAKRALRYAFLIYTKKSRAFASLDSIIFISDWFYTSKSSCSFSAVIASIFLMLSSVNF

SEQ ID NO: 5379 - protein, 186 aa, Enterococcus faecalis
RMSKEVLATAKEKMTKAEESLRRELGQIRAGRANASLLDRIQVEYYGAPTPVNQLASINIPEARVLMITPFDKNSIADIEKAIQMSDIGISPTNDGNVIRLVIPQLTEERRKELAKDVKKEAENSKVAVRNVRRDAMDELKKAQKNGDITEDELRSFEKDVQKLTDDSIKNIDAITAEKEQELLEV

SEQ ID NO: 5380 - protein, 247 aa, Enterococcus faecalis
RILEGIMMVKPKYQRVVLKLSGEALAGEDGFGIKPPVIKEIVQEIKEVHELGIEMAIVVGGGNIWRGQIGAQMGMERAQADYMGMLATVMNALALQDTLENLGVPTRVQTSIEMRQIAEPYIRRRAERHLEKGRVVIFAGGTGNPYFSTDTTAALRAAEVDADVILMAKNNVDGVYSADPRVDETATKFEELTHLDVISKGLQVMDSTASSLSMDNDIPLVVFNLNEAGNIRRAILGENIGTTVRGK

SEQ ID NO: 5381 - protein, 217 aa, Enterococcus faecalis
KMCFFCVSYFEESIRQKMLESSEVKMYQTILFDLDGTITDSGSGIMRSILYATEQLGWPAPSEETLRSFIGPPLYESFLHMAPSAEAAQQAVGHYRAYYQRKGMFENHVYPGIPEVLIRLKEAGAKLYIATSKPEKFAKKIITHFDLDRYFTGIYGASMDGHRSKKADVIQYALTEAQLEPTQGGHYHGLVIVILNFLGAQQKWVKIVIGVLVWDLG

SEQ ID NO: 5382 - protein, 389 aa, Enterococcus faecalis
HRIRRKMMKKIKVMTVFGTRPEAIKMAPLIKVLEEQSQGFDSVVVVTAQHRQMLDQVLEDFQITPNHDLNIMKDGQTLTDITSRVLNLLTEVLVTEQPDIVLVHGDTTTSFAAALAAFYQQIPVGHVEAGLRTWQKYSPFPEEMNRQLVDVLTDIYFAPTTQSKDNLIKENHPEEHIYVTGNTAIDAMAYTVDAHYQNDLLEKIPTDQRIVLITMHRRENLGLPMANVFKAVRRLVMEHPEIEVIFPMHKNPKVREIVAEHLGELARVHLIEPLDVKDFQNFAAKSALILTDSGGVQEEAPSLGVPVLVLRDTTERPEGVAAGTLKLVGTDEQVVYQEAKTLLTDSDAYHAMAHAQNPYGDGQASRRIVEAIAYEMQKSDKKPDTFTAK

SEQ ID NO: 5383 - protein, 61 aa, Enterococcus faecalis
LVRVSLVTEGKIIPPNVLAFGRPAKVIRPLTAAEIASNHTNALHYIQRAEEFRQQKYPKLT

SEQ ID NO: 5384 - protein, 141 aa, Enterococcus faecalis
QSLKKEYFIAASADVYGNVQLAKDSNIWFQSVLRGDSNTITIGEGSNIQDGTIIHVDEDAPTIVGKYVTVGHQCMLHGCKIGDGALIGMGSTILNNAIIGENSLIGAGLFSDRRQNYPAKCFSIWSTREGYPSVNGSRNSQ

SEQ ID NO: 5385 - protein, 601 aa, Enterococcus faecalis
YCGFSIVRGGISMKHAFSSMKRIGRYIKPYRVTFYLVILFTILTVAFNAALPYLTGLPTTEISRNIAAGESINFDYVIQCLIWILVVGTGYCVAQFLSGFLMTNVVQQSMRDLRRDIEEKINRLPVSYFDKNQQGNILSRVTNDVDAVSNAMQQSFINIVSAVLGIVMAVVMMFLINPLMAIFSVIMIPLSLIISRTIVKISQKYFQGMQNSLGDLNGYVQENMTGFSVLKLYGREKETLEGFKQVNHRLNGFGFKASFISGLMLPLVQMTAYGTYIGVAVLGSYYVVAGVIVVGQLQAFIQYIWQISQPMGNITQLSAALQSASASTMRIFEILDEPEEELNEQDVPLPEPILGSVEFENVSFSYDPEKPLIRNLNFKVDAGQMVAIVGPTGAGKTTLINLLMRFYDVTEGAIKIDGIDTKKMNRSDVRSVFGMVLQDAWLYKGTIADNIRFGKLDATDYEVVDAAKTANVDHFIRTMPDGYEMEINSEGDNVSLGQKQLLTIARAVISDPKILILDEATSSVDTRLEALIQKAMDRVMEGRTSFVIAHRLSTIREADLILVMKQGEIIEKGTHHELLEQGGFYEKLYNSQFAEEGDYEE

SEQ ID NO: 5386 - protein, 575 aa, Enterococcus faecalis
LKLMWRYTMRYKKLLFADFICVFGFILIELGLPTILARMIDKGIIPRDMDYIYQQGIWMVVITISGVAMNILLGYFGARITTNIVRDIRDDLFEKIQTFSHSEYESIGVSSLITRTTNDAYQIMLFMGNILRLGFMTPVMFIASLYMVMRTSPSLGMYVLGALPFLLLAVVGIARLSEPLSKKQQKNLDGINGILRENLSGLRVIRAFVNEKFEESRFNKVNETYTKSSKSLFRLMAAAQPGFFFLFNIVMVLIIWSGTVQISHGDLEVGNLIAFIEYIFHALFSFMLFASVFMMYPRAAVSASRIQEALDMEPAIREEEGVTETATKGYLEFKNVTFAYPGHAESPVIRNVSFKASPGETVAFIGSTGSGKSTLIQLIPRFYDVSEGEILIDGVNVKEYKLSALRNKIGYIPQKALLFTGTIADNLRYGKEDATLEEMERAIDIAQATEFVSQKPQGYDEPLSEGGTNFSGGQKQRLAIARAIIRNPEIYIFDDSFSALDYQTDANLRARLKKETTESTVLIVAQRVGTIMHADRIVVLNEGDVVGIGTHRELLETCPIYYDIAASQLSEEELA

SEQ ID NO: 5387 - protein, 128 aa, Enterococcus faecalis
MKKLFFIFLGSCTFALGTLGIFLPLLPTTGFYLLTAFFWMRSSDKLYNKFLASSYYQKYIQEAFFEKKITRKGKWKLFISMFLLFAIPCLIVRNTLMTTTLAIVYLAHVIGLSWYWRPKKKALELDQE

SEQ ID NO: 5388 - protein, 71 aa, Enterococcus faecalis
RRNESMIYKVYYQETKIRNPKREDTKSLYMEADSDVIVRQLVEENTPYNIEYVQLLDEKHLAYVFTTGRGG

SEQ ID NO: 5389 - protein, 75 aa, Enterococcus faecalis
KLESSIHVYRAMARMTQQDLANRVGVSRQTIIQLERNKYNPSLLLAHDIANVFGVTIDDVFTFKETLNDDVEQEA

SEQ ID NO: 5390 - protein, 351 aa, Enterococcus faecalis
KLVERVTEMLSTEDFDFDLPEELIAQTPLKDRASSRLLVVNKETGDMEDKHFHDILDELLSGDALVMNNTRVLPARLNGEKPETGGHLEVLLLTNTEGDTWETLIKPAKRAKVGTEIQFGDGRLKAVVKEELEHGGRIIEFKYDGIFLEILESLGEMPLPPYIKERLDDPDRYQTVYAEENGSAAAPTAGLHFTKELLEEIKAKGVHLVYLTLHVGLGTFRPVSVDNIEEHHMHSEFYRLTEEAAKQLNEVRQAGGRIVAVGTTSIRTLETIGTKFNGEIQADSGWTDIFITPGYQFKVVEAFSTNFHLPKSTLVMLVSAFAGKDLTLAAYQHAIEEKYRFFSFGDAMFIK

SEQ ID NO: 5391 - protein, 68 aa, Enterococcus faecalis
VSIHSYLEEELKMHAQFHHVSLLARHGQENQSFYTKLLGLRFVKNTVNQDNNRMPHYFYGDYQATPEA

SEQ ID NO: 5392 - protein, 226 aa, Enterococcus faecalis
RKKLFSHDWLKNSPKHSLSFWEQRLTENKIPFNKKEKSLHFSDPDDTHIILTEVPENPLKETLVVSNDIPAAVQIIGLASTEFHVPDSEKTLAFFETFLGWQAVGNTIILSETESFSVHQTTSDKTSRMGRGSMDHIAFSVADDEALQELHTRALAQGWEIEMYVSRGYFKSLYIREPGGNRVEFATLTPGFTLDEPLEHLGETLALPPFLEPKRTAIEANLYKDM

SEQ ID NO: 5393 - protein, 128 aa, Enterococcus faecalis
DTFSKYLVEVSKLIEFQHVSKFYKGGKVAVDDINLSFDKGEFICFIGTSGSGKTTSMRMLNRMTDPSKGKILIDGQDIQKINPVELRRQIGYVIQNIGLMPHMIIRENIVLLPKLLKVPVEKTHKIAE

SEQ ID NO: 5394 - protein, 236 aa, Enterococcus faecalis
WNEPFGALDPITRDSLQDLVKDLQERLGKTIVFVTHDMDEALKLANKIAIMSEGKVIQFDTPDNILRHPANEFVEELIGEDRLLQAKPDFTTVDEVMLNSAITITPEKSLQEAIKLMREKRVDTLLVVDNSHVLKGFIDVETLDQQRGKASSVGDILNKDVFFVQKTALLRDALQRILKRGLKYVPVVDEQKRVVGILTRASLVDIVYDVIWGDETTISEAVEAKQSESETDKEEA

SEQ ID NO: 5395 - protein, 212 aa, Enterococcus faecalis
AMSSFFQEYGSEMISKSIEHIYISFFALLLGVAIAVPVGVWLTRLPKVANIVIGLTSALQTVPSLALLALMIPIFGVGKTPAIIALFIYSLLPILRNTYIGMKNVDENYRDVAKGMGMTNLQSIFSVELPIAMPTIMAGIRLAAVYVIAWATLASYIGAGGLGDMIFSGLNNYQPELIFGGTIPVTILALLADVLLGLLENRLTPKALREGE

SEQ ID NO: 5396 - protein, 348 aa, Enterococcus faecalis
LSARINLWRDYSGNYFSAFSRCSSWIIRKSFNAKSFKGGRIMMKKKLKLSLLFLSSLLLLAGCSLPGLASTSDDNTVAITGGITSEAQILGSIVADMVEHYTDKKTNVINNLATTTINHQAMLNGDASISAARYTGTDVTTTLGLPAEKDPKKAFNLVQSEFEKRYQQTWFPSYGFENTYVFLVTKETAEKYNLKTVSDLGKVADKLVAGVDTAWITREGDGYEGFKKEYNFQFKSILPMQIGLVYDAVNAGKMDVILGYSTDGRIGSYDLVMLKDDKRFFPPYDAAPVVSDKLLKETPEIKDVLNRLDGKISTKKMQELNYQADNDLIEPAVVAERFLKENNYFEGE

SEQ ID NO: 5397 - protein, 221 aa, Enterococcus faecalis
QMNNMNLFQQFIYYFQQNGGYVFQQFLRHFLISIYGVIFAAIVGIPIGIMISRKRSLANWIIRLANIIQTVPALAMLSILMLGMGLGVNTVVVTVFLYSLLPIIKNTYTGMIQVDRNILDVGKGMGMTKVQLLYMVELPLSVSVIMAGIRNALVVAIGITAIGAFVGAGGLGDIIIRGTNATDGASIILVGALPTAFMAIITDWVLGIIERRLDPASKHSN

SEQ ID NO: 5398 - protein, 183 aa, Enterococcus faecalis
QTFQLIKNTEQIQHCFFSMGSVFLSRRSIMSNYTIIDLNQQPHLIPSAAQWFSQKWQIPAEAYQASMQEMLTSENHVPHWWVCLNKQQDIVAGVGVIDNDFHNRADLTPNLCALYVEPTFRHQGLAGILLTTVGDFLANSGFKKLYLLTDHTTFYERYDWEFLTMVTTEEQSCARIYQKQLRQ

SEQ ID NO: 5399 - protein, 591 aa, Enterococcus faecalis
RGEDHKLSRFAALALLSSDALSSIAYGTEQIVVVLVTLSAAAIWYSLPIAAFVIILLISLTLSYRQIIHAYPHGGGAYVVSSENLGRNAGLLAGGSLLVDYMLTVAVSVSAGAEAIISAIPALYGHQVAISIGIVILITLMNLRGLRESASFLMLPVYSFIAIITLLIVVGLFKIVTGAQPLNATALPGAVVPGISIALVLRAFSSGSSSLTGVETISNAMPFFKKPRAKNAAGTLALMATNFRFCFLGITFINYWYGIVPKEEMTVLSQIGKAVFGQNILYYLLQFATALILAVAANTGFSAFPVLAYNLAKDKFMPHMYMDRGDRLGYSNGILTLAAGSIVLLLIFQGSTERLIPLYSIGVFIPFALSQSGMVVKWRKETKNWLPKSIANIVGAFISFAIIAILFIYRLGDIWPFFIIMPVLIYAFYRVNTHYKNVAEQLRLEDGAQLHEFDGNTVIVLVGNVTKANVGALNYARSIGDYVVAMHVSMDENVEKEKEIQEEFKKHFPDVRLSIVHSSYRSLQNPILRYVDLVSKNATKHNYSTTVLVPQFVPNKRWQNILHNQTSLRLRIRLAWRENIIVATYSYHLKK

SEQ ID NO: 5400 - protein, 180 aa, Enterococcus faecalis
LKAGMTFEQDGKLIKVMEASHHKPGKGNTVMRMKLKDVRTGSTTDTTMRPDEKVKKAHIDTKPVQYLYSQDDMAIFMDLETYEQYEVPTALIEEELKYLLENMEVKIQFYGEKVIGLTLPTTVILRVAETQPSIKGATVTGSGKPATMETGLVVNVPDFVEADELLEINTAEGTYLKRAK

SEQ ID NO: 5401 - protein, 279 aa, Enterococcus faecalis
GTKIYAKLEYLNPGGSVKDRLGVHLLKEAMKTGKINQATTIIEPTAGNTGIGLGLAASQLGLKTIFVVPEKFSQEKQQLMQALGAKIVPSPTEQGIVGAITSAQDLAKEIPNSYVPLQFENPDNPAAYYEGLGPEIVQDLGGKITSFVAGLGSGGTFAGVGRYLKEQNSKTQLWGVEPEGSILNGGPAHGHEIEGIGVEFVPPFLKQIPVDGFYTISDEDGFFWVKQLAKKSALLVGSSRRRSICGGIKRGAPLTRPGSTIVTIFPDRSDRYLSKNIYS

SEQ ID NO: 5402 - protein, 382 aa, Enterococcus faecalis
EDTFMKFNTKLIHAGISKDTTTGAVSVPIYQTSTFEQNGVGQPKEYEYSRSGNPTRHALETLIAELEGGSHGFAFSSGLAGIHAIISMFGPEDHILLGDDVYGGSFRLLDKVFVANGLSYTIVNASDLSTIEAAIQPNTKALFLETPSNPLLKITDIEAAAKLAKKHQLLTIVDNTFATPYFQRPLALGADIVVHSGTKYLGGHSDVVSGLVVTNHPESAEKIAFLQNAIGAVLGPHDSWLVQRSLKTLGVRMAAHAQNAQKIAEFLEAHPAVATVYYPGLASHPGHEIAQKQMSGFSGMISFELAKDEQVVPFVEALEIFTLAESLGGVESLIEVPAIMTHASIPKENREAVGIKDGLIRLSVGIEAVEDLLADLEKGLQA

SEQ ID NO: 5403 - protein, 456 aa, Enterococcus faecalis
GGWDQRGKGVSVADVMTAGAHGVPRKITAGVLPDEHYPNHEAIDFYHRYQEDIQLFKELGLNCFRTSIAWTRIFPNGDEETPNEEGLRFYDALFDECLKNGIEPVVTLSHFEMPYHLVTKYGGFRNRQVIDFFVKFAEVCFTRYQKKVKYWMTFNEINNQANYEEDFAPFTNSGIAYQEGEDREAIMYQAAHYELVASARAVKIGHAINPDFQIGCMIAMVPIYPYSCNPEDMMMSVSAMQKRYWFTDVHVRGHYPSAIQCYLKRKNISLDVTEEDLTDLANGCVDYIGFSYYMSFAVKGAEKAPTFDYNEAKDLVRNPYVATSDWGWQIDPMGLRYAMNWFNDRYELPLFIVENGFGAIDELEPDGTINDTYRIAYLREHIEMMKEAVAYDGIDLMGYTPWGFIDLVSASTGEMKKRYGFIYVDKDNDGHGTLERRKKKSFAWYQQVIATNGEEL

SEQ ID NO: 5404 - protein, 459 aa, Enterococcus faecalis
TDTFAFILFFKGEIFMNEWINEKLLPPVLKFVNTKAITALRNGMLYTMPFTIVGSVFLLLANFPVTAISEWVNASGLAVYFNQAYGASFAIMSLFAVIGIAYSYVKSEGFEGLPAGMIAMVVFILFMSSEVKDAVSGAVIGNVINKDWTAGKGMITAIIVGLLVGVVYSWFLRHDIRIKLPEAVPENVANSFTALIPASVIVTGAMLIFILLDKVFNTTFFDFIYEVLQSPLQGVTDSLGGALLLGFVIPLFWFFGVHGSTIVGGIMGPILQANSLENTEILKSGKDLTLANGGHIVTQQFLDQFLTVTGAGMTIGLVVFMVFFAKSAQFKQLGRLSIGPAVFNINEPIVFATPIVMNPIMAVPFIITPIVSSVVTYFALYTGLVPLFTAVQVPWTTPPIISGLLVGGWQAALLQVVVLTMSFFIYLPFAKKMDALNYAEETNQPITEETLEKVEAQNV

SEQ ID NO: 5405 - protein, 85 aa, Enterococcus faecalis
SNAACQPPTKSPEMIGGVVQGTCTAVKRGTSPVYKAKYVTTEETIGVIMNGTAMIGFITIGVAKTIGSLILKTAGPIESRPNCLN

SEQ ID NO: 5406 - protein, 257 aa, Enterococcus faecalis
RRITLFDLDKVQTLNELEMLVYHYVLEHLHQIPQQTIRQLATSCHVSTSTILRFCNKMGYAGFSELKYAVKEEAKQTQTFENFYDATVHVDAFLKKLNQETYYEMLRPAIQMIVQARHVAFTGIGTSGILGSYGSRYFANLNINSYSIADPFTPIPKRGFENTLALILSVSGETNEMIKQMTDFKTAGAKVLSITNNQHSTIARLADYNISYYMPDERSPFADKSVNTTTQIPVIALIELLAHQASQLLKELDETPS

SEQ ID NO: 5407 - protein, 198 aa, Enterococcus faecalis
SFLRKQAKIDKKRKGGVDVAREVILFIAASIDGFIADKAGGVAWLEENIRGDEEDRSYDEMYEKIDTVVMGRTTYDQVTQELSPDVYFYEDKHSYIITSHPEPSTASRTFTKEDPVTLIRRLKEEDGAGIWIVGGPKVVQPLLAADLIDTFILTTIPLFLGEGIALYETMAQSIPVRLKQVYQKNELVYSIYQRENKN

SEQ ID NO: 5408 - protein, 189 aa, Enterococcus faecalis
  MISC_FEATURE (180)..(180): Amino acid 180 is Xaa wherein Xaa = any amino acid.
PFVLFLIDKEMVEEKKMKHQIKRRLYISPVQTIVLGFFLLIVVGTILLMMPFSAQAGQKTQWIDAFFVATSAVCVTGLSPLNTAEHWSPIGQVIIMILIELGGLGFLTVATIFFSLLRKKASLSVRMLYQEALNVSEVSGVFRLMKYIMKFAAIIQLLGAFLLSFQFVPTFGVDKTVVFXSLPCPFRHF

SEQ ID NO: 5409 - protein, 129 aa, Enterococcus faecalis
  MISC_FEATURE (83)..(83): Amino acid 83 is Xaa wherein Xaa = any amino acid.
QVFARTVLKNPSTLTEEFVRFALVWMAMLASAYVVGKKGHLAVTLLSEKLQGKQKRFLEFIVQLLFLLFAGVIMIFGGWNGVXITLGQISPSLAIPMGYVYLAVPVAGVLMFIYSLMNLLELFTQSKDS

SEQ ID NO: 5410 - protein, 439 aa, Enterococcus faecalis
KKKNRSKNMALEAGIILFVVFAVLLVVGMPIGMSIAASSIATLLLVIPFEAAAFTSAQKMVSSLNSFSLVAIPFFIFSGVIMNNGGIAQKLVNFSMLFVGRVPGALAHTNVLGNALFGSISSSAIAASTAIGGVLIPQQVNEGYDRKFATAVNIASAPTGMVIPPSTAFIMYSLVAGGASISSLFLGGYLVRSLWALGIMVVAYVIAKRHNYPTVAKAKKGEVSKVLREAVPSVLLIVIIIGGILTGLFTAIEASAIAVAYSLLISMFYYKTVKINDLPKMLKEAVLMSGTIMFLLATSSMMSFAMAFTGIPEAISTAILGITDNKYLILLLVNVVLLFVGMFMDVGPAILIFTPIFLPIVMNVGVDPVHFGLFAIMNLCVGSITPPVGTGLYVGASVGGVKAEQMLKPLVPFYLVILAILLLITYVPELVMWLPNLIS

SEQ ID NO: 5411 - protein, 293 aa, Enterococcus faecalis
EVLMDYWEKADYSWSDDSKRHILTPSSKSRTLFYYIQEIGQFKASRPYYTERAHLPSYLIKFTLNGTGELRYRYHTYSLQRGDLFFIDCRDYQYYQATSEDPWEMDWIHFEGGNSGAFFQEFMKNGSPVFSTNQLPEDNPIHLIIQQLLQLQDLQHAQTDYQSSVLIHQLLNELLLQKYRQDFTYETIPSLVLEMKAYIDQHFKETISLEDLAQLFHLNKYQLNKEFSKYIGLPPIKYQISKKISYSKDLLRYSNQTVKEIAVDVGLENYAYFSRLFKKRTGLTPSQYRKSGF

SEQ ID NO: 5412 - protein, 79 aa, Enterococcus faecalis
IGSFFNLFFFHFVDSCQSFHYFYFLYVRLTLCIHHKQKIALSPLTILRYNCTILVIRRFLWIIGKKPTTLGQTILSDIF

SEQ ID NO: 5413 - protein, 511 aa, Enterococcus faecalis
SNVQKIKIVKGLTTINKVKKEQVEKRTYLAVDIGASSGRIMKSQRLANGQITIEEIHRFKNGFHQKDGYQRWDMASLVHELLLGLQKVKQLGIKECFIGIDTWGVDYCLLDQSGQLLDEPIAYRDGRTEAAVTNFSKGYSLEKLYQQTGIQVQPFNTIFQLFVEEKERLAAASQLLLIPDYLGYVFTGKAVIEATNASTTQLLNAGTKQWESELLDFLGIDETLFPTLVEPGTILGDLQTAAFPDYDLPNATLITIASHDTASAILGTPGIGDDWAYISSGTWSLLGIETTVTTISAEAFQENYTNEWGAQNTIRFLKNIMGMWLIQEVARHQNYQYSYAELAALAEKEPAFQQFIDVNDPRFLNPGNMITELQAYCRETQQTVPESPGELARCIYDNLALCYSVELEKLAQLTGIERKITTLHVVGGGSNNRLLNQLTADVANVTVNAGPGEAIALGNLLMQMIATGELKDIPAARTCIQTSFPTEIYQANPIDSTIKNRYQAFMKRSSL

SEQ ID NO: 5414 - protein, 444 aa, Enterococcus faecalis
FNNKKSLSSIYEKELIMTTITQKYEEAKEKYASIDVDTEAVLEKMADVKISMHVWQGDDVRGFLSEDELSGGISVTGNYPGVARSPQQLRQDLEKAFSLIPGKHKLNLHAIYLDTEERVDLNELEPKHFEPWVTWAKENGLGLDFNPTFFSHPMYRDGFTLAHPNPQVRDFWIEHGKRSRRIAEYFGRELGQVAVNNFWVPDGFKDNPVDRLTPRKRLMASLDEIFSEEIDPAYTVDAMESKLFGIGSEAYTVGSHEFYMGYGLTRNKLICLDAGHFHPTEVISNKLSSLSLFGEGMLLHVSRPVRWDSDHVVIMDDELQEIAKELVRNDLLGKTHVGLDFFDATINRVAAWVIGTRNTQKALMKAMLEPTNVLKEAELIGDFTTRLALTEELKDFPFADIWNYYCQENHVPIGLDWLTDVQEYEKVILPTRQLPTGKDSCRFS

SEQ ID NO: 5415 - protein, 289 aa, Enterococcus faecalis
QTRGTSKMKKMNVLQAPFVEEMVKTTKNLYRLGWDERNGGNISYLLKEEEILPFLNPTQVLRKIPMKFDATKLAGKYFIVTGSGKYFKNVCDASSENLGILRVSENGQELELLWGLEDEAVPTSELPSHFMSHIARLAVDPENRIVMHNHASHLLAMSFTHELDEKVFTRTLWQMCTECLVVFPDGVGIIPWLVPGTNEIGVATAEKMKESRLVLWPQHGIYGTGRDMDEVFGLIETAEKAAEVYTYVCAQGGVRQTISDADLWRLAEAFGVTPKVGYLEEKVSKRRKL

SEQ ID NO: 5416 - protein, 124 aa, Enterococcus faecalis
SVHLCLCARRRSPNNFRCRFMALSRSVWCDTESWLFGRESIKTEKAMIKKAFCMQVYPDQHAEYQRRHEKLWPEMRQMLKEHGAIKYQIFLNPETSTLFGYLEIEDEARWEQIALTPINQKWGI

SEQ ID NO: 5417 - protein, 119 aa, Enterococcus faecalis
GEDMENSKKNQAVQVSNSYWIKVVAIFFVGWILMYATRTIFNPVMGVIGEQFGLSNTQLGLANSIFFLTYAVAQIPFGMIGDKIGRKLVIAVGFIVLAISTYFSGLATTFVMFLVIRAI

SEQ ID NO: 5418 - protein, 280 aa, Enterococcus faecalis
ALRLNNQLVISDYIFPIHQYGKMGTIHSVFERSFNLKVQDQLINVANFHNYLSSFGMFLPDQLFQEIFPYVQQGNKVKITENQLTFYSTVGVKTIQLTPAEVVSLNITHFKLEKDQLRLLRDRLLARNLERRIGLPLDERAKHIFKKMSQKQKVWTLSEWQEVTNYLIGRGKGLTPSGDDILVAYQTILFILADERAAALAATLSAANLSTTDVSKGYIASSAKGYVNSLLYQLLLDLENHRDNRVDENIDRIIQIGHSSGKDMSFGMLLALQSVELDEK

SEQ ID NO: 5419 - protein, 1004 aa, Enterococcus faecalis
TMLHTVILKNNYQDSINLMLLTNKINALDGVTMSQIMMGTDANKDILNNTNLLTDEANSASANDMMIVVDSEKENIMEEVMPAIDEFLDDLSAKGTSEEAQAATSWSEAFDLLPEANVALFSIPGEYGAPEMERALKNDLHVFSFTDNVSIEDEVRLKKLAHEKGLLMMGPDCGTGIISSIPIAFTNVVSPGNIGVVGASGTGIQEVTTIIDRLGGGVVHAIGTGGRDLSDKVGAITVKDAIVALENHEPTDVITVISKPPAKEVRDEVVELLQSISKPVVAIFLGEKPTSHEGKVYLAHTLEETAKIAVDLANDVAVKKNYFEALAKPAVPTLPEDKVVKGLYSGGTLASEAGMLISEALDLGGLVKAEGYVLKSHGYEVIDLGDDMYTQGRPHPMIDPDVRIEKIREYAQDEKTGIILFDVVLGYGAHEDMVGALLPAIEEARATAKEAGRDLYFVATVCGTTKDPQNYQSSVDRLKEGGVLVAESNTKAVQLALLLKGIEISEDDKEVVAYNGPTVDVPKPGEKVMELLTTKPRIINVGLQSFTESIVDYGGETVQFNWRPRANGNKKMIKILDALEDYSEQIEAENHKVTDKIKNAQPFLVDVVPAKSVIPELNDDAQKTLLHAGPPIQWSEMTGPMKGACIGAALFERWADNEEDALKIFEAGEVRFIPCHHVKAVGPMGGITSGNMPVFVVENRLEGNEAYCILNEGIGKVLRFGAYSQEVVDRLDWIKDVLGPTIAKALKLSEEGLNLNVLIARSITMGDEFHQRNIAASLNFLKELSPLIIKTDIPEDQKYEVIKFLADTDQFFLNVMMATGKAIVDGARKDTNGTIVTTMTRNGVNFGVRIAETGDQWHTAPVNTPKGLYFTGFSEEDGNPDVGDSAITETVGVGAMAMVAAPGVTRFVGAGGFEDALATSNEMAKICEGNNPTFSIPTWDFQGTCLGIDIRKVVELGITPIINTGIAHKNAGVGQIGAGTVRAPLGCFEKALEAYAEKLGITVE

SEQ ID NO: 5420 - protein, 541 aa, Enterococcus faecalis
FLSIRGKKEKMMKLRELLSIGDLKKGKILTKEIGLDNEVDSAMVLEAIDIENWSRKNQLILTSFYALHDLPEKELENFFVKMRRIGISGLILKTDRFIKMIPEWFIELCFNYEIPLIKITQDISYEKILFTIYEPLLNYQSHVLRTYYDVRQRFTKLERHYPTVETIMQEFYDIIKLPFALKMLDKHLEISDGDLPHDAIVLSREKLKNSEFTKNDYSLLTLYSHANPKKQLALEVSIFNSYSTNCLLLVYLQDEKVKETDLVIIENAIDVLQEKFNTENLLKKERYTRLNNLADAILQNTPQNPDELNSLLREVQMQELDSYQAIAFSTKDTNTQLMKERIIALLRTLRVKSIFFDQLNYSAVLFNFNESDGKITKLQLSRLLAELLEENDTLTVAVSSLKSREGIKELLIECLDILRFNETFYNGPIVTLADIGVFKNFIREDQLENLDELIPRALYQLAENNYDLFETLYSFFQNNRNYKQTSEAMFLHSKTIRYRLNKVEQLLDIDLANPLQLLNYEIATYIIKMRRRALEKQSNTR

SEQ ID NO: 5421 - protein, 90 aa, Enterococcus faecalis
GDVHLKNNQTLANGATVTIYPTTTEPTNYVVYLHGGGMIYGTKSDLPEELKELFTSNGYTVLALDYLLAPNTKIDHILRTLTETFQLLNE

SEQ ID NO: 5422 - protein, 183 aa, Enterococcus faecalis
IIQNQSFGLCGRSAGGYLMLQLTKQLQTLNLTPQFLFHFYGYTDLEFIKEPRKLLKQAISAKEIAAIDQTKPVWDDPFLSRYLLYHYSIQQALLPHFYGLPENGDWSAYALSDETLKTFPPCFSTASSSDEEVPFRYSKKIGRTIPESTFKAVYYLEHDFLKQTKDPSVITLFEQLDSWLKER

SEQ ID NO: 5423 - protein, 92 aa, Enterococcus faecalis
YTVYTIYTKGGLLVEIKERKLRKVGNSVVMTLSKEFLESIGATATDTVYVDEEKLKDIIVKKNMSEHQKKLQQMMENSKQKHNELYKELVTK

SEQ ID NO: 5424 - protein, 113 aa, Enterococcus faecalis
MKSIYYLSADDLFQMNTFLIQTYSPAEQIGIKDRNALEMASNQPAQFVFDVDLYPTIEEKAAILMINIATKHCFYNANKRTAVMATDLFLQLNGYDFQLDTQEGVDLLVFIAT

SEQ ID NO: 5425 - protein, 115 aa, Enterococcus faecalis
KTVLFIRQKEKGLSFTMQTIRCLFGKRGIIEPNKLNRRKGVDRMTKPTEEELKQTLTDLQYAVTQENATERPFSGEYDDFYQDGIYVDIVSGEPLFSSLDKYDAGCGWPVFTTGL

SEQ ID NO: 5426 - protein, 192 aa, Enterococcus faecalis
KETRRHQFMQIILASQSPRRQELLKRVVPTFTIAPADIDETVGKDGLPAEYVAQMAAQKAAAIAEQSPEALVIGCDTIVALAGEILGKPTSREDGYRMLRLLSGKTHDVYTSVTLKQGEKERSATVHSTVTFYPLTDTEIHAYLDTAEYADKAGAYGIQGQGALLIEAIAGDYYAIMGLPIAKVARLLKEFN

SEQ ID NO: 5427 - protein, 719 aa, Enterococcus faecalis
EPNRLGGREMGKIQELSEQLANQIAAGEVVERPASVVKELVENALDAGSTQIDIFIEEAGLKTIQIIDNGEGIAKEDVLNAFKRHATSKIHTRDDLFRIRSLGFRGEALPSIASVSEMIVETATAEEEEGSYVILKGGKVEENRPAALRKGTKMTVSNLFYNTPARLKYVKTIQTELANIGDIVNRLALSHPKVAFRLVHDGHKMMSTTGNGDLKQTIAGIYGISTAKKMLKIEGKDLDFTLTGYVSLPEVTRASRNYLSTIINGRYIKNFALNKAIVAGYGSKLMVGRFPIAVLEIEMDPLLVDVNVHPTKQEVRLSKEKDLMALIEQAIQEVLSQEQLIPNAADNLRFKKKLPPEPKAEQMEIPLSTEQPAVKQRPGSLSYNPATGRFYAEHATDETPASSAPEAVNQTERAVDPMDDPFAPPVPESTSVAEETSAYETSSAAADSANHWETASNEQQVIAEETKITEVPDSEPSLRSSEAADEVFQEEMKLHPEFDANSAASQRELKQALNKLEEERPTERFPELEYFGQMHGTYLFAQSKDGLFIIDQHAAQERIKYEYFREKIGEVSDDLQELLVPIVIDYPNSDALKIKEQKETLAEVGIHLEDFGQNSFIVRAHPTWYPAGEEESIVREMIDMLLTTGSVSVKKFREATAIMMSCKRSIKANHYLNEQQARVLLKDLALCENPFNCPHGRPVLIHFTNSDMERMFKRIQDPH

SEQ ID NO: 5428 - protein, 858 aa, Enterococcus faecalis
MPQKTKNTPMMEQYLSIKAQYKDAFLFYRLGDFYELFYEDAINAAQILELTLTSRNRNADDPIPMCGVPYHAAQGYIDTLIEQGYKVAICEQVEDPKTTKGMVKREVVQLVTPGTVMNSKGLEAKDNNYLTAVLTDGNQFGFAYVDLSTGELKTAVLADEEGVLNEASALQTKEMVLGSGIPESLKENLSLRLNIIFSTQETVEENAEFSFLTNELINPLEIEITGKLLSYLSVTQKRSLSHIQKAVEYQPDHFLKMDHYSKFNLELSQSIRTGQKKGTLLWLLDETKTAMGGRLLKQWLDRPLIQERQIKARQEMVQSLLNAYFERLDLQAALTNVYDLERLAGRVAFGSVNGRDLIQLRTSLEQVPTIRQLIVGINQGEWDDLLVDLNPVEDLVALIATAINEEAPLQITEGKVIKDGYNDQLDEYRDAMRNGKQWLAELEAKERQETGIKNLKIGYNRVFGYFIEITKSNLANLEEGKYERKQTLANAERFITPELKELERLILEAEEKSVELEYQLFLAVREQVKTNIDRLQTLAKTISAVDVLQSFATISERYQYVRPTLRSNTKNLAIVEGRHPVVEKVLGHQEYIPNSIRMNPETDILLITGPNMSGKSTYMRQLALTVVMAQIGCFVPAESAEMPIFDQIFTRIGASDDLIAGQSTFMVEMMEANQALRHATPNSLILFDELGRGTATYDGMALAQAIIEYIHREVQAKTLFSTHYHELTVLDETLKGLKNIHVGAVEKDGEVVFLHKMMEGPADKSYGIHVAKIAGLPSPLLERAATILSALEAEETTIPISVHHEEVSEVHEETEQLSLFKEVSTEELSVIDTLKKMNLLEMTPLDALNMLHQLQKRI

SEQ ID NO: 5429 - protein, 129 aa, Enterococcus faecalis
KMKVKKMEPLNLDAQSNKELEKLLHLIGQDEVIQRYQAIEEKVKKNKKLTELVEEIKAAQKDAVQFAHYGKPTAEKEAIQRADAKTKEFDEHPLVVAYREQLIEANDLVQHVTALIQYRVNEELEKEGN

SEQ ID NO: 5430 - protein, 279 aa, Enterococcus faecalis
AYQCHRKQNGLKANYNGEEITVKVSIVNQNEVPTGEQFDLIILFTKAMQLEKMLQDVKPLIADHTEVLCLLNGIGHEDVIEKFVPMEKIFIGNTMWTAGLEGPGKAKLFGSGSVELQNLGIGQEESAKKLAETLSASGLNAKYSDNIHYSIYRKACVNGTMNGLCTILDVNMAGLGATKPAHDMVVTIVNEFAAVAAKENVNLDIPEVIEHVETCFDPTTIGMHFPSMHQDLIKNNRLTEIDYINGAISRKGKKYGVVTPYCDFLTQLVHSKEEILGAK

SEQ ID NO: 5431 - protein, 342 aa, Enterococcus faecalis
KEDEKMEEKLTPKIFLNKVLAGTATGIIVGLIPNAVLAAILKLFGENTLAVTITQMAVIFQLATPLLIGALIAVQFGFKPMQMLVVAGAAFVGSGVVKFNPDTATYIGAGTGDIINTMITASIAVGMILLIGEKFGSVAIVATPIVVGIGAGLIGYYLYPYVTKITAAIGDLINTFTTLQPILMSILIACSFAFLIISPISTVAIGMAIQLNGVSAGAAAMGVAATTVVLVVNSWKVNKPGVTLAIALGAMKMMMPNLFRKPIILVPCLFTAIISAIPVALFSVSGTPASAGFGLVWLVRPLASLDAGLSIILLLITWFVVPIVPAFVGQISFEKILKSYDR

SEQ ID NO: 5432 - protein, 269 aa, Enterococcus faecalis
RRPSFTSSEKVLPCRKSQTEEVNAFKVRTLNDKYVAIFMDATYISLKRQTVSKEAIYIAIGIREDGTKEVLSYAIAPTESTYVWNELLQDIYSRGVHDVLLFITDGLKGMKDTIHQIYPKAKYQHCCVHVYRNIAHKVRVKDRKEICDDFKAVYQASSKEEANTFLGSMIEKWQKTYPKVTQSLIKNQDLLTFYEFPPGIRRSIYSTNLIESFNKQIKKYSRRKEQFQNEESLERFLVSIFDTYNQKFLNRSHKGFQQVTDTLASMFTE

SEQ ID NO: 5433 - protein, 215 aa, Enterococcus faecalis
DVIIVAVGYYLRYNLSYREVQEILYDRGINVSHTTIYRWVQEYGKLLYQIWKKKNKQSFYSWKMDETYIKIKGKWHYLYRAIDADGLTLDIWLRKKRDTQAAYAFLKRLVKQFDEPKVVVTDKAPSITSAFKKLKEYGFYQGTEHRTIKYLNNLIEQDHRPVKRRNKFYRSLRTASTTIKGMEAIRGLYKKTRKEGTLFGFSVCTEIKVLLGIPA

SEQ ID NO: 5434 - protein, 81 aa, Enterococcus faecalis; identical to SEQ ID NO: 4245

SEQ ID NO: 5435 - protein, 149 aa, Enterococcus faecalis
NFATEPAVGYVSKTAVCLFCVYLLSFTFVYASALSHQKESFERQSMILAGDLKDLVNRDTVTVHSTSLFKDSPVFVNSSKNYPILKELVPPNEALYWPNQFLFRTYTGLNVNMEIFDINALNKEESDLMKSNYYHDIYVKDSEVFVHVK

SEQ ID NO: 5436 - protein, 66 aa, Enterococcus faecalis
MIINNLKLIREKKKISQSELAALLEVSRQTINGIEKNKYNPSLQLALKIAYYLDTPLEDIFQWQPE

SEQ ID NO: 5437 - protein, 100 aa, Enterococcus faecalis
QKGGIKMAIFIWILDIISVVYFVFNLTDSKKDERILYTISLTSTYMYLFINFSILIVIAIFLLLPNVITKNYLFNFIYYYFSLSMILHSLLLLFFNKRTS

SEQ ID NO: 5438 - protein, 73 aa, Enterococcus faecalis
WRVRIMENLSVVPSFEELSVEEMEAIQGSGDVQAETTPVCAVAATAAASSAACGWVGGGIFTGVTVVVSLKHC

SEQ ID NO: 5439 - protein, 65 aa, Enterococcus faecalis
STVLNKENQENYYSNKLELVGPSFEELSLEEMEAIQGSGDVQAETTPACFTIGLGVGALFSAKFC

SEQ ID NO: 5440 - protein, 473 aa, Enterococcus faecalis
KRSAYMEDNLINVLSINERCFLLKQSGKEKYDIKNLQAWKERKSVLKQDDLDYLIKYKYESLDNFGLGITPIENFPDKEVAIQYIKDQSWYIFFESILDSYNDSEEKLLEVDASYPFRYFLQYARLFLLDLNSELNICTKEFIINLLETLTQELIHLTSKTLVLDLHTFKKNEPLKGNDSSKRFIYYLKKRFNSKKDIIAFYTCYPELMRITVVRMRYFLDNTKQMLIRVTEDLPSIQNCFNIQSSELNSISESQGDSHSRGKTVSTLTFSDGKKIVYKPKINSENKLRDFFEFLNKELEADIYIVKKVTRNTYFYEEYIDNIEINNIEEVKKYYERYGKLIGIAFLFNVTDLHYENIIAHGEYPVIIDNETFFQQNIPIEFGNSATVDAKYKYLDSIMVTGLVPYLAMKDKSDSKDEALNLSALNFKEQSVPFQNIKIRNTFTDELGFEYPTPLYGILPKILQFMNNGKKLF

SEQ ID NO: 5441 - protein, 395 aa, Enterococcus faecalis
PNSVVKTLLGLFFIPSWRKKKKEHDWLPWMFGWTVFMFFSYVLYLEIIRGTAFFLIPIAFFGLFALFYFKEKRRLLNGTLFNIFLVVLATYLGITAIRTNNYFLITLAIIALLAIFIALALRLYALIIFLYWNAVVVMRKESRSLWNLLTLLLAIGLTLLLIYNFFFQSLLPTWLSLPLTIAPFILTYFAFVFYNFLTVSTLYQFNQPKYTQDYIVVLGSGLINGEIVPPLLQARINKAIQFYKAQNRATLNPPKIVMSGGQGPDELLPESVAMKMYALTQGIPDDDILVEAHSKNTLENMRFSKETMIEDFGNANFQAIFTTNNYHLFRAGLFARMAGLKADGIGAKTAFYFLPNAFIREFIAIVVMYKRRHIIVCGLAAIGMVMLFLTGLIIQ

SEQ ID NO: 5442 - protein, 359 aa, Enterococcus faecalis
LFSKEGVSPMSLYQKFIQNERLRRFCVLALIIFVLYLSRSMITTILLTFIFTYLAVRLVHFVQRYMKIPTIVIVLLTYALVVFLIYLAITKYVPVLVNQTTQMINSVVDFYQSPHTDTNQVLQFIDQYLEKSNLLSQLQNGASMILRYIQDIGAVGLSFVMSFILSFFFMIEKKQMADFSKLFLKSDFDWFFQDIYYFANKFVNTFGVVMEAQFFIAVVNTVITTLALAIIGFTQLPSLAIMIFILSLVPVAGVIISCIPLSFIAYSQGGLNDVIYILALITIVHLFESYVLNPKFMSSKTELPIFYTFVILLVSERLFGVWGLIVGIPVFTFFLDVLKVKPIRGLKRLPNVKKNSSAE

SEQ ID NO: 5443 - protein, 803 aa, Enterococcus faecalis
LKTVVIIDALRTPIGKYKGSLSQVSAVDLGTHVTTQLLKRHSTISEEIDQVIFGNVLQAGNGQNPARQIAINSGLSHEIPAMTVNEVCGSGMKAVILAKQLIQLGEAEVLIAGGIENMSQAPKLQRFNYETESYDAPFSSMMYDGLTDAFSGQAMGLTAENVAEKYHVTREEQDQFSVHSQLKAAQAQAEGIFADEIAPLEVSGTLVEKDEGIRPNSSVEKLGTLKTVFKEDGTVTAGNASTINDGASALIIASQEYAEAHGLPYLAIIRDSVEVGIDPAYMGISPIKAIQKLLARNQLTTEEIDLYEINEAFAATSIVVQRELALPEEKVNIYGGGISLGHAIGATGARLLTSLSYQLNQKEKKYGVASLCIGGGLGLAMLLERPQQKKNSRFYQMSPEERLASLLNEGQISADTKKEFENTALSSQIANHMIENQISETEVPMGVGLHLTVDETDYLVPMATEEPSVIAALSNGAKIAQGFKTVNQQRLMRGQIVFYDVADPESLIDKLQVREAEVFQQAELSYPSIVKRGGGLRDLQYRTFDESFVSVDFLVDVKDAMGANIVNAMLEGVAELFREWFAEQKILFSILSNYATESVVTMKTAIPVSRLSKGSNGREIAEKIVLASRYASLDPYRAVTHNKGIMNGIEAVVLATGNDTRAVSASCHAFAVKEGRYQGLTSWTLDGEQLIGEISVPLALATVGGATKVLPKSQAAADLLAVTDAKELSRVVAAVGLAQNLAALRALVSEGIQKGHMALQARSLAMTVGATGKEVEAVAQQLKRQKTMNQDRAMAILNDLRKQ

SEQ ID NO: 5444 - protein, 449 aa, Enterococcus faecalis
LLFSTKCTSILKYIIKSQNHKCQLLNVNRLIRYFLIIYEVNTKIPHFGSFRAILYNESIYRKGVKEMTIGIDKISFFVPPYYIDMTALAEARNVDPGKFHIGIGQDQMAVNPISQDIVTFAANAAEAILTKEDKEAIDMVIVGTESSIDESKAAAVVLHRLMGIQPFARSFEIKEACYGATAGLQLAKNHVALHPDKKVLVVAADIAKYGLNSGGEPTQGAGAVAMLVASEPRILALKEDNVMLTQDIYDFWRPTGHPYPMVDGPLSNETYIQSFAQVWDEHKKRTGLDFADYDALAFHIPYTKMGKKALLAKISDQTEAEQERILARYEESIVYSRRVGNLYTGSLYLGLISLLENATTLTAGNQIGLFSYGSGAVAEFFTGELVAGYQNHLQKETHLALLDNRTELSIAEYEAMFAETLDTDIDQTLEDELKYSISAINNTVRSYRN

SEQ ID NO: 5445 - protein, 269 aa, Enterococcus faecalis
VTKNNKDRQMGDLKMKKHVIVGCLLIVSSMFVSACGNSSDVTTEKTSVTKQVEATGQSTSSSVDQTKYDAIITEAKKLTAEGQYKESEEKLATIPVSDLGKPHYSIVKETVEKLNNQNSEGLKRQEEVAVEKQTKSSPAPTGSLKPIPDEFAKWATTYLFYYPRGDQKQAGLIIEANGAVTQTNTNGEIYTGKAEISGASGTILSYDTTSYRPTTQPATKSITPNVKITVTWNNGGGVDVYYGYVSYSQRLALTDGIAVTDGVKEVWLS

SEQ ID NO: 5446 - protein, 201 aa, Enterococcus faecalis
KMELTVKDIQTWLDNYSKVIEEKKDYLSELDTPIGDGDHGNNMARGMAEYKIAFDKKVPTTITETFKVLSMALISKVGGASGPLYGTAFMNMTKATKDLETISSPEQLKEIVQQGLAGIQMRGKAEPGDKTMVDVWAPVAEVIGTEQFNEEKIEQFAEATKDWVAKKGRASYLGERAIGHIDPGAASSALLFEELVKVINQ

SEQ ID NO: 5447 - protein, 327 aa, Enterococcus faecalis
MKKIINEPGKIVEEMLQGIVKSYGNLVHQVEDSRVIARNDSNKQVGLVSGGGSGHEPAHAGFVGDGMLNAAVLGDVFTSPTPDQILTGIQAADQGAGVLLIVKNYTGDILNFEMAKDMADMEDIHVEMVVVDDDIAVEDSTYTAGKRGVAGTVLVHKILGHHARQGASLEELVSLGEKIVSATKTIGVALKAATVPEVGKPGFTLPEDEIEFGVGIHGEPGYRREKIQPSKELAKELVEKTLSSYEQQPQTVGVLVNGMGGTPLMEQFVFMNDVLTLLEDKGVQVTFHKVGNYMTSIDMQGLSLTMIDLATKDWQTALESNVTTISW

SEQ ID NO: 5448 - protein, 81 aa, Enterococcus faecalis
SAPYPGGWTRSLNGIDSLLSIVQMPGGVPVATTAIGSAGATNAGLLAAEILSIDDLQLAERIQARRQSLEKAVMESGEQLE

SEQ ID NO: 5449 - protein, 395 aa, Enterococcus faecalis
QKESKQDDNHWKKRLWKVGNNLNKPLKVGATIGIIGGGQLGRMLVMSGKKMGFQMIVLDPTLNSPAGQVADRQIVAAFDQISALTELAELSDVITYEFENIEVASLEKAIPLEKLPQGTELLKITQNRLLEKTFLQSIGCKIAPFAEVKSQKELPQAIEKIGFPCVLKTIQGGYDGKGQVVLKCEEDFSQATKLLANATCELEKWVPFTKELSIIVAGNKHGYQSFPVSENIHRKNILHESIVPARISENVQQKAAELAQYIAEELNLSGVLAIEMFLTDSEELYVNELAPRPHNSGHYSIEACSFSQFDAHIRGISNWGIGLPQLLQSVVMVNLLGEHLEKSYQLCTSKPTWQVHYYGKAESKVGRKMGHVTITTPCLSETLKEIETVGIWNVT

SEQ ID NO: 5450 - protein, 218 aa, Enterococcus faecalis
VRKNRVHEANEKRERMEKKALVYTGKAKKLYQTENAAVLFVEYLDQATALNGQKKDKVLGKGALNNQITSLIFEHLQQQKIPNHFIKKVSEHEQLIQVVEMIPLEVVVRNYAAGSFSKRLAIEEGTKLVTPIIEFYYKEDRLDDPFINEDHIQFLKVATPAEIVEIKALALQINQALSQLFQRFNISLIDFKIEIGLTKANQLLLADEFLQTPVVYGI

SEQ ID NO: 5451 - protein, 91 aa, Enterococcus faecalis
QLIEEEARMYFVKVYVTYKESILDPQGEAVKEAVHRLGFTEVAEIRVGKYFEMHVQQTEAIEEKIEQICDQLLANVNMESYRFEILSLEEI

SEQ ID NO: 5452 - protein, 224 aa, Enterococcus faecalis
MKLAVIVFPGSNCDADLLWAVKEVMGIDAEFVRHDATSLAKFDGVLLPGGFSYGDYLRCGAIARFSPIINEVIRFATEGKMVFGTCNGFQILTEIGLLPGTLLRNDSLRFICKSVPLKVNTHTKFTSEYPENVSIHLPVAHGEGNYYCDEKTLKELKEKNQIVFTYQEKVNGSLANIAGICNEQGNVLGMMPHPERAMEELLGSTDGRSFFASIIKNFGKELSQ

SEQ ID NO: 5453 - protein, 472 aa, Enterococcus faecalis
KLWKGIKPMMNEPTPKEIKETRLYAEWGLTDEEYHQIETILQREPNYTETGLFSVMWSEHCSYKNSKPVLKKFPTEGPQVLQGPGEGAGIVDIGDGLAVVFKAESHNHPSAVEPYEGAATGVGGIIRDIFSMGARPIALLDSLRFGELTDARTRYLFQEVVAGISGYGNCIGIPTVGGEIAFEPCYQGNPLVNAMCVGLIRHDEIQKGQAKGVGNSILYVGAKTGRDGIHGATFASEEFSEGEEQQRSAVQVGDPFMEKLLLEACLDLIKNHQDILIGIQDMGAGGLVSSSAEMASKTSSGLILELDKVPQRETQMSPYEMLLSESQERMLICVEKGAEQQVCELFQTYDLEAVAIGSVTDDGQYRVFHGGKIVADVPVDALAEEAPVYQKAYQEPERMRAFKKLAPFIPEITNSTELLKRLLQQPTIASKKSVYETYDSQVQTNTVVQPGSDAAVLRVRGTNKALADDDRL

SEQ ID NO: 5454 - protein, 281 aa, Enterococcus faecalis
PMTTDCNSRYLYLNPEIGGQIAVAEAARNIVASGAQPLAITDCLNYGSPDKPESFWELWTSADGIAAACRQLGTPVISGNVSLYNETDGQAIYPTPMIGMVGVIEDVSQITTQAFKQVDDLIYLIGETHADFNGSEIQKIQLGRIEGQLRSFDLKEEKANQELVLKAIQVGLVASAHDCAEGGVAVALAESAFANELGLQVTLPLKKEYLFAETQSRFILSVSPQHQEAFETLIGRKAQHIGKVTETGLVIHALDDVINCSTKEAKALWEDAIPCLMKQKA

SEQ ID NO: 5455 - protein, 497 aa, Enterococcus faecalis
CDQLLNKRSQSLMGGCDSMSYEAKSLNEECGIFGIWGHPDAAQVTYFGLHSLQHRGQEGAGIVANNSGKLDGHRDLGLLAEVFQKQEQLNALEGTAAIGHVRYATAGTGSVDNIQPFLFKFNDSQIGLAHNGNLTNAKRLRKQLEREGAIFHSNSDTEILMHLIRKSTAASFLDKLKESLNLVKGGFAYLLLTETMMIAALDPNGFRPLSIGQMNNGAYVVASETCALETVGARFIQDVAPGEVVIISDEGLKIEVFTTEVQPAICAMEYIYFARPDSNIAGVNVHTARKRMGKNLAIESPVAADMVIGVPNSSLSAASGYAEEAQIPYELGLVKNQYVARTFIQPTQELREQGVRMKLSAVRGVVKGKKVILVDDSIVRGTTIRRIIHLLKEAEAQEVHVRIASPPLKYPCFYGIDIQTRDELIAANYSIEEIKEQIGADSLAFLSEAGLIDGIQLNYDAPYSGLCMAYFNGDYPTPLYDYEEQYQASLKKETRRN

SEQ ID NO: 5456 - protein, 351 aa, Enterococcus faecalis
KKKLGGIDMENAYSKAGVNVEAGYEVVERIQKHSQKTQRTGTLGMLGGFGGCFDLSSYKLKEPVLVSGTDGVGTKLLLAIEEQKHETIGIDCVAMCVNDVVAQGAEPLYFLDYLALGTVNPAKVEAIVAGVAAGCCEANAALIGGETAEMPDMYEADAYDGAGFAVGIAEKSQLLTPSNVKEGDFLIGLPSSGLHSNGYSLVRNIFFKKHSFKTTDKLPELAPKTLGEELLTPTKIYVKELLPLLKAGLVHGAAHITGGGFLENLPRMFSSALAAEIQLNSWPVLPIFKLIQKYGEIPPEEMYEIFNMGLGMILAVSPEHVEKVQELLPEAFEIGRLVPRKTKAVIFKEAL

SEQ ID NO: 5457 - protein, 193 aa, Enterococcus faecalis
GSLMKIAVFASGNGSNFEAIAAAFSQKKIAGHLSLVFCDQPEAYVLTRAQKRKIPVVCFSPSDFSSRGQYEEQVLKHLKEHQIDLIVLAGYLRIIGKTLLEAYPKRIVNIHPSLLPSFPGLHGIEEAFHYGVKITGITIHYVDSGVDTGPIIFQTTTKIDTEDTVDTLAEKIHALEHEWYPKIISQIVKETMK

SEQ ID NO: 5458 - protein, 538 aa, Enterococcus faecalis
ARMVPKNNFTNCKGDNEMTKRALISVSDKTGVTTFAAGLVANGFEIISTGGTRTVLEEAGVPTLAIDDITGFPEMLDGRVKTLHPNIHGGLLAKRGNQAHQKALTEQGIHFIDLVVVNLYPFKETILKPAISEAEAIEMIDIGGPSMLRSAAKNYQDVTAVVDPSDYEQVLSEISSTGTSQLATRKRLAAKVFRHTAAYDALIADYLTTQVGETEPEKQTLTYERKQTLRYGENSHQQATFYQSVVPVSLSIASARQLHGKELSYNNIRDADAALRIASEFTEPTVVAVKHMNPCGIGTGKTILAAYRQAFEADPVSIFGGIVVLNGPVDQATAAEMHQIFLEIIIAPSFEEEALALLSQKKNLRLLTLDFHAQEKKAVELVSVMGGLLIQEQDTVVENDQAWQVVTERQPTPAERDALNFAWKAVKHVKSNAIVLANESQTVGIGAGQMNRIGSVKIAVDQAQAAGKLQGAVLASDAFFPMADSVEYAAQHGIQAIIQPGGSIKDQASIDLANHYGIAMIFDSESSFQNRHCLTTGR

SEQ ID NO: 5459 - protein, 83 aa, Enterococcus faecalis
FAKGGPLMKHSQLVAIIKRLEAMIEAADNEVQVRRFEREGVEKCIVSFDKSTETFELTESDTHQSYQFDNIDIVAMEIYDLIQ

SEQ ID NO: 5460 - protein, 247 aa, Enterococcus faecalis
TPKAIAEASDIIFTMVGSPSDVEGVYFNETGIFQADLTGKIVVDLTTSTPTLAEKIAKKAAEVGAHALDAPVSGGDLGAKNGTLTIMVGGDQESYDTVLPIFKTFGKTFMLHGSAGKGQHTKMANQLMIAGTMTGLTEMLVYANATGLTLEKVLETVGGGSAANWSLSNYGPRILKEDYTPGFFVKHFIKDLKIALDEAKKLDLPLPATQKATELYESLADKGFENDGTQALIKLWWTDGKQPTNKN

SEQ ID NO: 5461 - protein, 166 aa, Enterococcus faecalis
IKTTCLLFFSSFFEKKGLSDCCISGKGKKEHIIMQQNYNEKSIQHQFDAYCKKVLRNEITSIRKRNTNIKYNEEPLTDSTEGKYSQTHFDEQDVYFLFGMEILISDQKLSTAIDHLSEIRRKVILLYYFAGFNNTEIGKILNMSTSGIWYQRKKAVEQLKTEYDLW

SEQ ID NO: 5462 - protein, 82 aa, Enterococcus faecalis
PMVDNKKKRQYPLVPLSVIQSALEEDPISIKMILKHYHSYIVKLCLTNGFNEAEQFITYVDEYMLRQLEIKLIEAILKFKIN

SEQ ID NO: 5463 - protein, 65 aa, Enterococcus faecalis
NQHMEVILNQLLLSKAHRNFTSLQVYGEPYGSIIIPNSNHRFLLTIKIILECLSLLLYDKKSWHN

SEQ ID NO: 5464 - protein, 99 aa, Enterococcus faecalis
YFVILTPKIKKCNTYYQNVGVNFMDFQDYEKIFESYPSILKITDLTKMLNIGKNKAYNLLKDKSIENIKIGARYKIPKKAVIEYILKIQDEGKNHAIIE

SEQ ID NO: 5465 - protein, 405 aa, Enterococcus faecalis
NSQNFCRYFSLRGEIELKLRANIIEKRGTLQVIVSYKDSNGKIRQKWKDTKLKKKGNKKRAEKIRDEFLLELESQLAMECECANPDLLFYDYLLNYLEVSKKQVAFNTYVGYKHYVHNRIYKFFYPKKIKLNRLKPYHLQDFYQYMLNDDCTANTVIHYHAFIRKALQEAVITELISTNVADKVRKPKKKQFVSQVYNQHEILKLLDILSEEKLYLVVLLTAFYGLRRSEVLGLKWSAIDFLNKKIMINHVIIENPENMSQLIKKDQTKNSSSYRTLPLVETIERALVNQAKWQQDNRILLGEDYILKDSEYVFTMEDGRLMKPQYVTHRLSKLIKKNGLKKIRFHDLRHSNASIMLDSGQNMKSIQEWLGHASYSTTANLYTHLTAGVKERAAEALENAFGFKE

SEQ ID NO: 5466 - protein, 721 aa, Enterococcus faecalis
KGGKRMTQQIALAGNPNSGKTTTFNMLTGANQYVGNWPGVTVERKEGVAKKDKTLIIQDLPGIYSLSPYTPEEIVARDYLLEDQPSVILNILDVTNLERNLYLTTQLIETGLPVVCALNMMDLLEKNGQTLNSEKLSYGLGVPVVEISALKNRGLDHALKQSKQRANAIETEVIYPSYDNRLEAALAEIVDILGNTVPETQQRWYSLKLFERDVRTKEQLLLSSFQEKEIEEVIQITEKIFQDESEAIIINERYAFIARLIALCATKKTEMTFTHSDKIDRVVTNRWLALPIFAFVMWLVYYLSIQTVGTMGTDWLNDVFFGEWVPQFVGNWLAQWQVAPWMQSLILDGIIAGVGAVLGFLPQLAVLFLCLGFLEDCGYMARIAFVMDRLFRKFGLSGKSFIPMLIATGCGVPGVMASRTIENERDRRMTIMVTTFMPCSAKLPIIALIAGAFFPNQSWVSPSAYFLGVASIVLSGIALKKTKHFSGDPAPFIMELPAYHLPQLRSVVRHAYERCRSFVKKAGTIIFVSSILIWFMSHYSVTFQPVPESQSILAFLGKGLAVLFIPLGWGNWQGAVATITGLIAKENIIGTLGILFGNVKDVSENGVEVWGALQHTFTPVAAYSFLTFNLLCAPCFAAIGAIRREMGDLKWTLGAIGYQCGLAYMVSFVIYQLGHVLVEKGTLTLGTFLAMGVVLAGFYFLIRKPKPDKESVQAITSLERG

SEQ ID NO: 5467 - protein, 157 aa, Enterococcus faecalis
MITLAQAEVGKVYTVESVQADIQTKKHLNNLGVVAGQAVVLVNYQNQNGIVLLHNSRIALTDTILQAIHVEERSANEKVWVSLDTLKVGERATIVGIHGQGAVKRRLMDMGLTKGTVIFIRKVAPLADPIEINVRGYELTLRKSEAELILVEKEESE

SEQ ID NO: 5468 - protein, 471 aa, Enterococcus faecalis
LLTRYKELDKMMKITDEKAEDVNLSTIKVVKRDGRLVTFDDQKIYDALIKAEQKIHDQVTPLTHQKVQSIVADVNREIAERFTNNVKIYEIQNIVEHTLLSNNEYALAEEYIHYRTQRDFERSKATDINVSIGKLINKDQTVVNENANKDSDVFNTQRDLTAGIVGKSIGLKMLPSHVANAHQKGDIHYHDLDYHPYTPMTNCCLIDFKGMLNNGFKIGNADVESPKSIQTATAQISQIIANVASSQYGGCSADRIDELLAPFAERNYEKHLADAQEWIEGEERQKAFARKKTKKDIFDAMQSLEYEINTLFTSNGQTPFTSLGFGLGTNWFEREIQRAILQIRINGLGIEKRTAIFPKLIFTIKRGVNAQPTDPNYDIKQLALECATKRMYPDVLNYDKIVELTGSFKVPMGCRSFLQGWKDEQGEEINVGRMNLGVVDLNLPRNRFRSAKKSKKVLAILNERLPNVKKP

SEQ ID NO: 5469 - protein, 262 aa, Enterococcus faecalis
  MISC_FEATURE (243)..(243): Amino acid 243 is Xaa wherein Xaa = any amino acid.
QNVGARKMKKIVEVNHVSKTYGRLNNKTEVLDNISFTVDEGEFVGIMGPSGAGKSTLLNVLSSIILPTAGIVRIAGQDILKMRDNQLSDFRRNEMGFIFQSFNLIDTLNVKDNILLPLAVEKVSLEEMDKRLLHVTSILGIQELLSAYPPEISVGQKQRVAAARALITNPKIIFADEPTGSLDSKSATELLKYLAEINLHDDATILMVTHDPYTASFCNRILFIKDVAIFSEVVRQGSRKGFXNRVKDMQATIGGGGRANDF

SEQ ID NO: 5470 - protein, 711 aa, Enterococcus faecalis
  MISC_FEATURE (21)..(92): Amino acids 21, 23, 30, 86 & 92 are Xaa wherein Xaa = any amino acid. 1
KICKQRLVEAAAQMIFKLSLXNXKAHVPNXLVYHISMTFAAVVNYCFRAIANNQPLVAGAGRDIEIKRSLGLGSTLVTIIILGFMXAANRFXIGKRSQEIGLYRLIGLRKSQVSLIFLVENLVLGFVSLINGIILGVIFTKLFSMILAKVMFLEVPSFFYISWRSVIETGVAFAFMILIVCLRSIWMIYRYPLSQLMHQEKIGQINYSRLTKRRQLLGILGPICLLVGYFIAFDFRNLATGIVYKQLNDSLDISIPMIITLTPFIILGLCVVGTYLFFRYTMYFIIRLFNHRKKWYYQDLRMITLGNAKRYLFKSSKTLTGLTLLIATALSGIGVMVFVYTISMHTVNSDGPVDFLVSQESYPKLKKVLDEAKDTKIKNEVTLSYKITGIERSLRIGQAQEEQETIEAVNVLSFSNYRNYQKINPYLNDLHLKNDQSVIYMDSFTNILSGMSRYESKLQFVEGEKAQLQQVLPNYLGNFLLQYSLPTIVVSDALYQKVTKNSIQYQINAVNVDTKSREKLYEAVNKQIATEWQAPILYKYEKNNQQLSGFAKQMPNEEVKNTQDDVTETWRLNMNDRYASLRYERKINGLTLYVSMFVAILALFITGSILMLRQLFSAVSERQDYVTLKRMGVSSKAITKQIYRQNSLIFFPPMVIGILHTTFAIYLLSQFIKSPGYLLVYLSCGILIIVYLIFYILTSAIYARMIRHIHF

SEQ ID NO: 5471 - protein, 514 aa, Enterococcus faecalis
RVLRRRLYMEKVINMIQTIDEWARKEPQRPVYLTEEKVSTYGELKEKSDNLAAYLAELKTDKSAIVVYGELDFEMIVSFLGASKAGFSYIPIDAHTPKERIELILNVAKPTAVIAVHEWPELATEVPVITAEELTEMMMHAPRHAPALMPVTGASNYYIIFTSGTTGVPKGVQISHDNLVSFTNWLLQDFGLEEGARFLAQAPYSFDLSVMSIYPALALGGSLTPLPNEIINDFKQLFTRLPQLTIDVWVSTPSFIELCLMEPSFDGEHLPALRTFLFCGEELPKPTAEKLAARFPTAHIYNTYGPTEATVAISAIEITQEVLKSVQRLPIGYVKEDTQIYIMEGMSKLPAGEIGEIVIAGPSVSKGYLNNPAKTAEAFFQLDGVPAYRTGDAGKLVDNLLQYEGRLDFQIKLHGYRIELEEVDHHLTNVSYVKQAVVVPKYQGNKVQQLIAYVVPQAHEFSSDFQLTKAIKQELATLTMDYMIPQKFVYVEQLPLTSNGKIDRKGLMNEVNAT

SEQ ID NO: 5472 - protein, 405 aa, Enterococcus faecalis
GECHMMNFPHMIPYNAPYYFVLLIAALLPMILTLAIKGTRWPWYQTLVTLVFLYISFGGEFWQQGVALIVYVIYQTLLTWGYAAYRKNKNAGWVFYLAVFLAILPLVWVKVSPFMTGKTTLLGFLGISYLTFKAVQVVMDLRDGVMKEYHPFRYIQFLLFFPTISSGPIDRYRRFEKDLKNPPSAEKYLDFLEKGIFYLFLGFLYKFIISHYLGGVFLPHVEKMALAQGGLSWWTVGYMYNYSLYLFFDFAGYSLLAVGTSYLMGYDTPMNFNKPFLSWNIKEFWNRWHMTLSFWFRDYIYMRLMFFLMKKKVFKSRIVTSNIGYFALFLIMGIWHGLTWFYIAYGLYHATLICVTDAWLRFKKKHKDKIPSNKFTHAFAVFLTFQAVCVSFLIFSGFLDKLWFK

SEQ ID NO: 5473 - protein, 76 aa, Enterococcus faecalis
YCFLNVHYKLPLYIFIFIYLNHSLSKNPEKIRKLTQTAWKVKKTANACVNLFDGILSLCFFLKRSQASVTQISVAW

SEQ ID NO: 5474 - protein, 90 aa, Enterococcus faecalis
INKNKNIKGQFIMNIQETVLNILEDITGTDEVVNNQDIQLFEEGLLDSLATVQLLVEIEGQLGIQVPVSDFDREVWGTPKQIIQQVEALQ

SEQ ID NO: 5475 - protein, 441 aa, Enterococcus faecalis
SMGNTKTNHSTSGSFTIMSRNKRLIRILGPVLCSAVLVAVFFFAPFRINLTSEKTLKEASTSMAPNVLKGNVIKNKAVASGKYVPFFGSSELSRFSAFHPSVLSEKYQRNYRPFLLGEAGTQSLTQAMVIHSMGDAIANKKAVFILSPQWFVKKGVPNDSFGAHYSQLQTYQWLANLTELTSGDQYLAQRLTKFPVVQKDKVLMETLANLQAGQLPQRSQRDYFIMNLRFLNREDELFSQIGMVSREPIVEKDMKQLPATYNFNELDQLAGKIAAKAINNNKFEISNGFYRQRIKPVLPKLAHSQKKWDYRFSPEYGDFQAALEQLAEKNVDVLFVIPPVNKRWSDYTGLSQDMLQQVARKLKYQLQEQGFTNIADFSTCSNERYFMADTIHLGWRGWLAVDRQVDEFMKQPASKKLAYQIDDRFYQTDWQQQNPLVLPQF

SEQ ID NO: 5476 - protein, 98 aa, Enterococcus faecalis
YFSESTLGWKALNRLNSEEPKKGTYLPEATALFLITLPFKTFGAIDVDASFNVFSEVKLILNGAKKNTATKTAEQSTGPKILISRLFLDIIVKLPLVE

SEQ ID NO: 5477 - protein, 592 aa, Enterococcus faecalis
PNVSRNCTFSIERGGPCMSSRPKGGPMGGGPGRNIGAKGPKPKNFWKTVKRLFRYMSKRMLSIIAVLVLAIAAVVFQIQTPKVLGQATTEIFKGVMKGAAEMKQGLKITSFPIDFDKIGQILLIVIAMYLISAVFNFLQQVIMTRVSQRTVYELRQELEAKMNKVPISYYDIHSNGDIMSRAINDMDNIASTLQQNLTQLITSIVTFVGVLWMMLTISWQLTLIALATVPLSLIVVMVVAPRSQKHFAAQQKSLGLLNNQVEETYGGHVVVKSFNHEESDQEVFEKENEKLYHAGRKAQFISAIIMPLMNFIKNLGYVFVAVLGGVKVANGMMDLGDVQAFLQYTNQFSQPITQIANLMNTIQATVASAERVFEVLDEEEMVDEPSGIPVETDSPYRVSFEHVAFGYSPEKLLMKDFNLNVKPGEMVAIVGPTGAGKTTLINLLERFYDISSGSIKYDGVDTRDLSREELRAHFSMVLQDTWLFTGSIYDNIHYGNEQASEEEVIRAAKAAHVDDFVRKLPEGYQTILNEEASNISQGQRQLITIARAFLANPDVLILDEATSSVDTRTEILIQAAMNRLLENRTSFVVANA

SEQ ID NO: 5478 - protein, 575 aa, Enterococcus faecalis
LIKLVKRMSLWSVFAAVVFMIVQIIADLYLPTLTSNIINDGVAKGDINYIWSTGVVMLGFSLISIVASIGNTFFATKESQSLGKKLRTDIYRKVENFSNNEFDKFGTASLITRTTNDVNQIQMVMQMFLRLMINAPLTLIGASFMAYNKDPQLTKIFLYVLPIMAVLVGGIMFLAVPLFKSMQKKTDRLNLVFREGLTGVRVIRAFGKANYEEQRFDEANKDYTQTAIKVNTIVALMIPLMTLIMSGTNIAITWFGGHYIAEMQLEVGNLIAFMTYAMQILMSFMMLSMIFVMVPRAQASADRINEVLNTDSEIKDVPNPELLSLKGDKATLAFEHVNYRYQHAENLALEDIDFSAKSGETVAIIGGTGSGKTTLVNLLPRFYDVESGKILLNGKNIKDTSQHNLREMIGFVPQKAVLFTGTIRENMQYGAPNATDEEIWQALEIAQAKAFVSELAEGLDSHVEQGGGNFSGGQRQRLAIARALVKPADVYVFDDSFSALDFKTDANLRKALKEQMTDAIVVLVAQRVSTVMEASTILVLDEGKLVGKGTHEELLANNQTYQEIVHSQLREEDLA

SEQ ID NO: 5479 - protein, 235 aa, Enterococcus faecalis
QCVIKGRNTNMPTNTFFHLPEEKQQRLLDAAQIEFSRHSLQEASIANIVKLAGIPRGSFYQYFENKEDLYFYYFATLRKNSERDLEKQIIAENGDLIEAMDVYFSKMIVEVLTGENASFYRNLFVNMDYRASRRVTDNLATGEEEKNRKQHCHKHRGRKGHAAYAEHLYQIIDHSKLTIETPKEFTWFMQTAMHAVFSTIVDGYRQQRENTAYDSTEAVKQLKMKLSWLKNGAYK

SEQ ID NO: 5480 - protein, 197 aa, Enterococcus faecalis
KQLRGAFLMIKQLQHPFFVIMGPSGSGKTAITSKVFPKNYKVISHTTRKKRLDEVDGVDYYFETKASFQALIETNQLVEYDFYHGNYYGVGVAAIVETTKEHPAYNALTFPGFQAVFERFGESVIPVFFDVSKENIYQRLKQRESDPKIIEERLNLYDQEILIKNQLEQYPNYQRIDANGPIKEVAGLLQECIKHYY

SEQ ID NO: 5481 - protein, 489 aa, Enterococcus faecalis
KTIGGGTSMTTTTKFPKGFLWGGATAANQLEGAYLADGKGLSVADAMPGGKQRFAILGDEAFDWTIDETKYRYPNHTGIDHYDRFKEDIALFAKMGFKCYRFSIAWSRIFPQGDETQPNEAGLKFYDAVIDECLSYNIEPVITISHYEMPLHLAKEYGGWKNRQLVDFYERFAETVLTRYHQKVNYWMTFNEINSAFHFPALSQGLVKSNGANDYQNIFQAWHNQFVASSKAVKIGHELNPELQIGCMIIYATTYGIDSNPVNQVATMIENQEFNYYCTDVQVRGEYPAYAERMYQKYAVKDLVIEEGDLELLKEYPVDYIGFSYYMSTAVDVTGTTNDTANGNLLGGVKNPFLEASEWGWQIDPEGLRIALNELYNRYQKPLFIVENGLGAIDKVDENFYVADDYRIDYLRRHIEAMAEAVADGVDLMGYTPWGCIDLVSASTGEMSKRYGFIYVDLDDEGNGTKNRYEKKSFNWYKQVIETNGQNLD

SEQ ID NO: 5482 - protein, 316 aa, Enterococcus faecalis
LLNLTQGGDTMVPMLLPAVIAQGGAALAVFFLTKNVKLKGLALSSSITTIFGITEPTVYGVTLPLKKPFIAACIGGGIGGAFVAMNHVKNFTFGLVSMLSLPGFIPAETKDTAPMITGAIGAGIAFIIAFVLTFVLRFEDQPNPETATEKTETDKMVAPVKTNQEDKIILASPLQGEILPLEKVQDPVFASGALGKGVAIEPTEGKLYAPADGEITTLFPTGHAVGLTTTEGVELLMHIGMDTVELDGKGFELSVKQGDSVKKGDLLVTFDIAAIKEAGYPVVTPIVVTNTNDYLDVLDMNQTDVLHGEDFLAIIK

SEQ ID NO: 5483 - protein, 104 aa, Enterococcus faecalis
PASLMAAISKVTSKSPFLTESPCFTDNSKPLPSNSTVSMPICINNSTPSVVVKPTACPVGNNVVISPSAGAYSLPSVGSIATPFPKAPEAKTGSCTFSSGKISP

SEQ ID NO: 5484 - protein, 184 aa, Enterococcus faecalis
NPWLRPRCASFINQELTRNGNQPVTVALDVFPTKSFEEVLKNVDYMIEEQPNKVAKNAFHSLIPERLLTFYLEKLAIEEVPAKQLTEKQRLSFVELLKDFQFTVTKTLPLEKSFVTGGGISLKEVTPKTMESKLVNGLFFAGELLDINGYTGGYNVTAAFVTGHVAGSHAAEIAEYTYLPIEEV

SEQ ID NO: 5485 - protein, 504 aa, Enterococcus faecalis
RLGCPFLRTQDSFVSEMKEEGKMKKLSIHLKDVSIHFSGKPILEIDELFVYENEKIGIIGKNGAGKSTLLNLIMGKIQSDKGKVQRLNDFHYLAQVAEEITNESEKTDKNCLLNQKNQKLSGGEKVQKRLATLFSEYPTGVILDEPTTHLDKEHRQLLVADLTYYYGTVLFVSHDRFFLNQLAEKIWEVSDGHVKEYLGNYDAYCRQKELEQQTQYNVYHQYQKEKKKLQESYAKKQAQAQKSSHVSKKQKQKQIKPSRLAGSKQKDTVQKALQKQAKAINARIDRLPDVAQAKQERKIIFPTNNQFSLYNPYPIRIENLTFAYENRTILNQVNVQIPLNEKIALCGKNGAGKSTFLQQIEARHPAIYFSPKVRLGTYHQLDYRLKNDEPLLTYLLKRTNYSEKIVRSLLYRLGFQQENLQTKIFSLSGGEAIKITLAQLFIEPNNIILLDEPTNFLDLDTIQALEEFISAYQGTVIFTSHDETFVEKVATRTIYLENGKIIDK

SEQ ID NO: 5486 - protein, 211 aa, Enterococcus faecalis
DLFNLFCQKVNPNSDRCQHTIIPPRLITPTLTPLLSFVNSDPKMRESDFSRIQFYRNYGKIKTEVKTMKITLTRKTSAWGALRYFTFYKNGVHQGKLFTNVPIEIEADPGDVLTFYEGWFQFYRRIEVTEDTKEITIINSKKLQHVFYTCVVLFLILTLLFLSAQKLSTFIIAEILIYSGIQWLFRQQTYHFTVKKKTESFASYSKKSIAH

SEQ ID NO: 5487 - protein, 473 aa, Enterococcus faecalis
QFNQGGRRRMTRGALKIATIGGGSSYTPELIEGYIKRKDELPIKEIWLVDIEAGKEKLEIVGAMAKRMIKAAGLDWEVHLTLDREAALKGADFVSTQFRVGLLDARIKDERIPLSHGVLGQETNGAGGMFKAFRTIPVILAIIDDMKRLCPDAWLVNFTNPAGMVTEAAIKHGDWKKTVGLCNVPIGHRKQAAEMLGIPEEDLFFKFAGINHFHWHRVWDKEGQERTQELIDLIYGPKQEQESHLKNIFDAPFHYEQLKDLGMLPCGYHRYYYIEDEMLKHSIEEYERGETRAQVVKETEGRLFELYKDPKLDYKPKELEERGGTHYSDAACEMIASIYNDKRTDMVVSTENNGTITDLPYDCVVEVSGPVTAHGHEPYNWGAFPPAARGIIQNMKAMEETVIRAAINGDYGAALHAFTINPLVPGGVMAKTLLDELLIAHKAHLPNFADAINKIEETQPETVTYVAELMKSN

SEQ ID NO: 5488 - protein, 333 aa, Enterococcus faecalis
KMTSIIDVAKVAGVSKSTVSRLISGKGYVSADSQEKILKAMKELNYTPNYVARNLRAGATKTIGFLAPSYLGSLGIFLNRFISIAKKYNYSVTLFFTDGDQQKEIDALNQLKYKQLDGLFLLTRTNEWSVIEPYSAYGPLATWHRIDSPNIYSSYIDHYSGYYRSLEYLQQQGYQKIGHVLGNPENLNTHARKRAMKDFYENTQAPWQTEWLINDQYTNHSGRKIAHYWQQLTDKPEALAFYNDHVAAEFISELENLNYAVPRDVAVIGFDNSYVSELMHITTVDYAIQYQAENSFIYLYNQLNQTNIPEKKLTVRLVERRTVPKKDPADQSL

SEQ ID NO: 5489 - protein, 295 aa, Enterococcus faecalis
MLNRLRTMANANRLNLTAEQVAMLNQQATFKKAKISFDENGKIKTGEDNTGIQMALAMGITILLFVFISSYSSIIAQEIASEKGTRIMEVILSSTKAQTHFYGKLTGVILVALTQIFIYGVAFVLGYSQLKNLDFMKSLLSGISPQSIFSSTFIFTLGFFIIGILVFAVLAALCGSLVSKPEDTAKAVQPIMYIGLIGYMIGITFGTNDPQNIVVKVTSFIPLISSYIMPVRLATETASTMEAIVSLVILAVFGIILTIFSARLYKSNVLVYSEGGMIQSLKQSISILKNEQKHK

SEQ ID NO: 5490 - protein, 138 aa, Enterococcus faecalis
MQQRWKSSSSGNCDQGKGVKTMQSPTALNKRGNKVTIDGYTFDSQKEANFYTKFVKNCGLPFEVHPRFRLTELTPTADGIGKISAIAYSPDFIIKNLDGSWRHVIDIKNSFGVYGIDQSVKLRFRLFALRYGHPVVAI

SEQ ID NO: 5491 - protein, 99 aa, Enterococcus faecalis
KQIDRKGNHSMPYVVKISAYLGKDGRPVANLKDAVLFEQKETAAIATIVSGGTVSEVKEAIIIPEKPKKHIGKSIKRIDKKEPTEKATKSNQAWMKGAK

SEQ ID NO: 5492 - protein, 181 aa, Enterococcus faecalis
TQKLSLLLKLQIEPPTEIFLNKPIHMNLSGKSGVGKSHLAISTAWEVLEKSNYDKRCLFISYAELLEQLKFAMNDEQARKEITGSLMAEIKSADLVVLDDLGAELGVKQIDDRNKSTNFNNDTLNRIVEARQNKATIFTTNLTGKEMSQAYGERILSRIMSNSQGFVMKIEGTSDKRVAGI

SEQ ID NO: 5493 - protein, 126 aa, Enterococcus faecalis
SWILGSERMQSASDGFSKMIKTLLYITPDPCPECGGNLYAWRAKNKDGSDRCPPTCMECGYKARKKAEDLETEKMFNDSLKARAINYLKYSSLYTDKNLINCRFKTYKTVDTETKLAFEIANRATN

SEQ ID NO: 5494 - protein, 267 aa, Enterococcus faecalis
KEASRLAIGGWIKLYRTIQDHWIWENPQYLKWWLDLIFMANHQDRKILFDGELKTVKVGERITSEKKLSERWEVSRNTVRKFLDLLVKDDMIELSRSRQNGTWYKVSNYAEYQNFSEIKKQRTEQRREQQAAHQTEQRTEHKQEPKEPKNLRNNNNNNKGAFIRSIWENNGFGLMSSKTMTDFDYWISDFEKIGASQKEAEQLIVKAIEIAIDANARNYNYINAILKDWEQRGFKSVEEREAARKQKKTTKKQKSNTGHSDYDDLGF

SEQ ID NO: 5495 - protein, 284 aa, Enterococcus faecalis
WLVMKPIRKRVKLMSQRLKKTIILSDENYYSQEADLAYMSVSQYKKFLECEAAALAKLKGEWTPENDPKALLVGNYVHSYFESPEIHEAFKEENKSKMFSSRKPFGLLKDFQIAEQMIERLKQEEAFLNIYQGEKEVIVTGEIGGAMWKGKIDCLNLEEKYFVDIKTTKDMHEKKWDERLNRKANFIERFGYVLQMAVYCELLRQQYDKIFLPLIAAVSKQTPSEAKLITLSEEKMIYELEELKENIEHVVRVKNGEEEPVSCGICEYCRGHNKITNFTSMDDL

SEQ ID NO: 5496 - protein, 351 aa, Enterococcus faecalis
SQHGNMTKKRRMTMSNDLTQITQRSLDEQVIGNLNRLQEQGLEMPPGYSPQNALKSAFFELTNNSGGNLLQLAANNPETKTSISNALLDMVIQGLSPAKKQCYFIKYGNKVQLMRSYFGTMAVLDRVTGGADITPVVVREGDVFEIAMDGPDLVVAKHETAFENLDNDIKAAYVVIKLANGKEVTTVMTKKQIDKSWSKAKTKNVQNDFPEEMAKRTVINRAAKYLINTSNDNDLFVQAAKDTLENEFERKDVTPEREEQAAVLEEKLFSNNIKAVDQENENERITRVADVPEQPDIEQAKPIEKDNLTKVADQILEEPVQETLDVMAGYETNQKESEADVSTIEEDDYPF

SEQ ID NO: 5497 - protein, 76 aa, Enterococcus faecalis
TAMIEVRGLSDDVYELMLANAQNRIIQSIRTAAANGNTSCVVNSKGLTSTFLSQLETEGFDHVELEENKTKIFWEW

SEQ ID NO: 5498 - protein, 121 aa, Enterococcus faecalis
RPTSTAIKVGQLQISNSRRVYHMNRKIERMIIELEKECKAQNVELLLCATNFETGQGSTAFCGSVIGLAILLQKLVGDLKEQLSISESCDCPECVAEKAEDAANEKSMDELLTAFLRGELQ

SEQ ID NO: 5499 - protein, 117 aa, Enterococcus faecalis
VNKGSSTTKKGVGDGFYHKKDKSWASEIKGGNKYEKNISLKTYGGTVGCIRTRSIGRWQYWPINPKHIYSSFYHLVALLRFSVGRSRRKKTKIKTHFDGHQSRSVTNIKFKESVPHE

SEQ ID NO: 5500 - protein, 91 aa, Enterococcus faecalis
TREVLRQRRVSEMASITKKINLGQAKSREEINMKKIYHLRRMAALLVVFGLGLLVGGNIGPLIQNIYIAAFIIWLLYYDLALEDREEKKQK

SEQ ID NO: 5501 - protein, 93 aa, Enterococcus faecalis
EVIAMEVILTPENEASLRDFVHGIIVDEIEKARRDTAVDKRVLNQTEIAKYFNVSTTTIREWEKLGLPHGSVSKQGKFYDKEGCRRWLLSQKR

SEQ ID NO: 5502 - protein, 106 aa, Enterococcus faecalis
NIMKFELNGFDELQHELNQFAKNGESLDDEHSVPFDKLFTKKFMIENTKFSNIDEFIEKSGFDFSDMESIDDNKLDNFISSNTNFDSWEDMKSAAGSEWVAKKLGF

SEQ ID NO: 5503 - protein, 146 aa, Enterococcus faecalis
YNFLISKWSAEITDKVVNDMKLSHDCIRDILLFSESLPYNEPAFGDKIFKSDLLKKYSSEEINYAVSKLGDDDAQLIKGYVKFASNKPYMTCISSLTFDGHKYLDNIRDPKIWKESKKISSKLASVSIDIMSEIAAKVITKTLGLD

SEQ ID NO: 5504 - protein, 82 aa, Enterococcus faecalis
FFSLQIKKKGMEEMKIDEAVSKAMKKGKYIYRESENDCSAHVNILPTNTYDCCLLLQENSNSVGKRWNPTANDLMASDWEIR

SEQ ID NO: 5505 - protein, 86 aa, Enterococcus faecalis
VLFENLLANKLAYVILLLTNMVKFQTFLLTFLVNNALLERECLPMNLLELIIKLPKDQDCLFYPLEEEVIIGEIIIYHGNKQTPLS

SEQ ID NO: 5506 - protein, 111 aa, Enterococcus faecalis
KKRSYLMFNFNETIERRHTNCVKWDTVEASYHEKDLLPLWVADMDFKVHQPILDALSQVIEQGILGYAVAPNELYQAIQEWQRQHHQLIVEQEDILFNSGVVPVWPKRSNV

SEQ ID NO: 5507 - protein, 137 aa, Enterococcus faecalis
VETEKEIYRMKRGNLMKYKIGMVLSGTITGLQPYGAFVSLDEETQGLIHVSEVQAGFTKNIHGLLTVGQKVTVQVIDVDEYSQKISLSLRTLEDKVHSVNHRRKKYFTDKNKKIGFATLDKELPEWIDEAMDKLLEK

SEQ ID NO: 5508 - protein, 127 aa, Enterococcus faecalis
KLIEVDVVSNKKVAGTIILNLNDGSKKFLMHPIGEAIEFAMAKVSDEMTGLASMLQWFKEEVQLDVTSISLVELTNAHINKENVPLFVFEMDEQALKNEMDKDYTWVAPAELKTIWSKYHIEGVPMF

SEQ ID NO: 5509 - protein, 72 aa, Enterococcus faecalis
ESGPCLSPSVADHPLRSAMHRGLGEPLPHQLANAPRVHPSATPESAFHSYAMRHKLLCGISTCFQVLSPSDG

SEQ ID NO: 5510 - protein, 322 aa, Enterococcus faecalis
KYSYVHERKDIMLDITLRSLSLLVYLFLISYFFSNWSTAIKNHREFYNVIWIVIIISAMVTIILSNAYIPNIYLPYLNLLLSFILTYTIAMLHSVPYLDSAVWTMTLISINLICEVLSLHFTKIILNAELTSYGSPTFFITSITITTLIGVAWIVILKFSIVKEAKSELSTNLSFIVILLPIPILSIIILFGLLIGNNNDKISEITITISVIFLNICVIFLYKITIEYQKNQYNLTLRKKNIEVEYRILNEIKRNRTNVLKLKHDLKNQYLTILGLIENEEVNEAIDYIKSSFDILEPPTKTYAADGVLNYLLNVDIVSHHG

SEQ ID NO: 5511 - protein, 88 aa, Enterococcus faecalis
RKITQMFKNMTLIVIVISEILSLLFPIKSPNKMIIDSMGIGNKITINDKFVDNSDFASLTIENLSMTIQATPIKVVIVIEVMKKVGLP

SEQ ID NO: 5512 - protein, 242 aa, Enterococcus faecalis
NEKKEVLLLKVAICDDNPTLTEKINTMLFNYNPNIFETYTYYNPLKLVNQLDQENFDFFILDIEMSEMSGIDLAKKIRERDILSPIVFLTSYKEYMEEVFQVQTFDYLLKPPTEDRLHQVLEKLRQQLEKKRNYFVFSSNKVTYKIPTKDIIYFEKDKRQVLIHTVGEIYKPYMSTNQINEQLDTNFVQVHSSFIINCAYIKELGKNFLLMDSKEKCIEIPISRRFKAAAHKSIVMSMRGKI

SEQ ID NO: 5513 - protein, 147 aa, Enterococcus faecalis
KEPAMLQKYIEILTRDEVIFRKKPDGTEVNYFLFPEFEIHINSLPGKTVQGWHKHHEIEEVLLVQSGKVKIEELENQQIISRICAEGELIRMHKSLHRISNPDTLSASFTVFRFVPQGQNQQECIKNDKEEFSDAAVQRLLKINDSL

SEQ ID NO: 5514 - protein, 310 aa, Enterococcus faecalis
NFGGNKMYDVIIIGAGPAGMTAALYASRSNLSVLMIERGAPGGQMNNTAEVENYPGFDSIMGPELAYKMYENVEKFGTENAYGIVMGIEDHGSYKEVICDDKSYEAKAVIIATGCEHRKLGVKGEEEFAGRGVSYCAVCDGAFFKNKRLVVVGGGDSAVEEAIYLTQFASEVVIVHRRDELRAQKIIQDRAFANEKISFVWDTVVEEIVGNEMVVTGVKARNVKTDEVSEIEANGVFIYVGLDPLTEPFKKAGITNEAGWIETDQEMRTKIPGVYAIGDVREKTLRQITTAVGEGGIAGQQVFNYIEELK

SEQ ID NO: 5515 - protein, 161 aa, Enterococcus faecalis
KKRWEYQFMVYTVDFKEVATIGLESSPVAPALAGLRANEARYFWNKYKHRFTTVPASEAPETLAWIEKILLERELHFPYKPLEISSFTLDGIKMAYVFYENGLAVNVMYTLAEEGKRAVGFKLSDGMAIPAEFEGKFKFARQKSKLAGTIRGSYFVIKGTY

SEQ ID NO: 5516 - protein, 176 aa, Enterococcus faecalis
MLNKKKRGNFMLKKPFLLFFSLLGAIFILASCGIGKDAVTDTKYKVSLQQAAEIYEKEAGNSKPLVNVQFDTEPANDYSYIFTNDTETLYVNPETGKVTKNTEANQLGENETAFSAAEVKELGAVNDVLAKAKKEVGGLSPRILTWKLTKNNNKLVYTVDVKTTTADEKVTLDANK

SEQ ID NO: 5517 - protein, 70 aa, Enterococcus faecalis
ISAACCKLTLYLVSVTASFPMPQLAKIKIAPKSEKNSKNGFFNMKLPRFFLLSIHNHLVYGGFIKITNKK

SEQ ID NO: 5518 - protein, 794 aa, Enterococcus faecalis
LKVVLLINWKKDAKNMLELKEIKKYYTVGGTTTKALDGVSVAFRKQEFVAILGPSGSGKTTMLNVIGGLDNYDSGDLIINGKSTKNFKEADWDAYRNNSIGFIFQSYNLISHQGILDNVELGMTLSGISKAERRQKAEDALIRVGLKDHIHKKPSQLSGGQMQRVAIARALANDPDILLCDEPTGALDSETSLQIMALIQELSKEKLVIMVTHNPELAHEYADRIIEFSDGQIRHDSRPHIEHEKKEPFELKRTKMKFTTALRLSFNNIRTKKGRTFLTAFASSIGIISIAIVLSLSTGFQKQIDKTQSETLAQFPITIFKIATDQDPESFNNQDKKGTFPKEKEVTAKISDADRAQHTNLIDQKFIDYVNHIDPELSNNIGYTRLVNMNLLREINGKAQAVKFSNDAPDGQSNAMASMMAAQTGVGVSAFPKQLENGKNNFLKDNYSLLEGNYPEKETDVVLIVDSNNTTNINALKNLGFDVKDNQKIAFSDIVGTKMKLANNNAFYTKLPTGNFIPNQDLQAVYDNPENTELTISGILRIKDSSTMNLLAPGIAYSDALSTNMIAKNKTSDIVKAQEASNTNVMTNETLDASAKENLLSYLGANEIPSSIMIYPNDFKSKDKILDYLDAYNKGKDKKDQIIYSDLAGTMTRLTGGLMDAITYVLIAFAGISLVTSMIMIGIITYTSVIERTKEIGILKALGARKKDITRVFDAETAILGVASGILGVVIAFLATFPINAVLYNLTDLENVATLNPIHGIILIVISTILTMIGGHIPPRMAAKKDAAVALRAE

SEQ ID NO: 5519 - protein, 169 aa, Enterococcus faecalis
VGNEGEHMDKEKHSSNLDISVFTEIFSYMSQLLFKDLDLEDLKLTKLDMLILLIVATNEGISMTELANQVGTSKVQVSRSIAGLEERAIVQRRHNQENRRVVNVYTTKEGEKLFKQKENQVKQQLSETLSVLSLEDYQEVNQHFLAVMKILSNYQALRRKTCKENNAKK

SEQ ID NO: 5520 - protein, 288 aa, Enterococcus faecalis
LMAKAKSYQKKQRTALTSVYIILTILAVFWMFPIVWIILTSFRGEGGAFVPYIIPKTFTLENYKVLLTNQTGNFPFVRWFLNTLFVSIASCLLSTFITIAMAYALSRLRFRLRKPFLKVALVLNMFPGFMSMIAVYYILKALNLTESLFALILVYSAGSALGFYIAKGFFDTIPMALDESAMIDGANKWQIFTKITLPLSKPIIVYTSLTAFMGPWMDFIFAKVIMGDKVENYTVAIGLFSMMTKSTANSLFMAFTAGCVLIAIPITILFILMQRFYVEGVTSGSVKG

SEQ ID NO: 5521 - protein, 169 aa, Enterococcus faecalis
FAQFRGEEACSLINTSRPFLTDPNLAKLTRIAVNMWIGIPATMLISTGIIQNLPEDQIEAARIDGANKWQIFKSITFPQILFVMTPALIQQFIGNINNFNVIYLLTGGGPANSNFYGAGSTDLLVTWLYKLTVDTMDYNLASVIGILIFILSAVFSLIAYTRTNSFKEA

SEQ ID NO: 5522 - protein, 117 aa, Enterococcus faecalis
KMAYQALYRVWRSQRFDDVVGQKAITQTLKNAIVQKKTSHAYLFTGPRGTGKTSAAKIFAKAINCKHSQDGEPCNVCETCVAITEGRLNDVMEIDAASNNGVEEIRDIRDRANYAPT

SEQ ID NO: 5523 - protein, 434 aa, Enterococcus faecalis
LRSRILSPPLGNGIKLIHMDIKKSNRRNESMTTSQMIADFTTLAIQAGGWMELDRLYLQNRLLSMIGEQELGEVDIRPVATPAADLAEQLCQVASANQLVKTEQQKEQFMVQLMDLLTPPPSVVNAFFAQHYAKEPQEATEYFYQLCQKNGTVIEQEEPVVFSTVYGDFLANKVHSEASKATLSAQSYPRCEWCMATEGYQGSQQFPATTNHRVIRMNLDGESWGFSFVKQAQYQQQGVIAFEKHQSAKRSIKTFQQLLKIVEVFPHYFAGIDADFEQNEHVYYQTGLQQFPLAEASISEYVELANYPLINAGMVNWPVETFRLEGPNASEVAQAANDIFEQWQMLKLPTDEIQIVARRKELLYVMDLIFSRPQAKPSLTLAEVQGLTTWNNQKTQALETVASAYQQRLKEASAFAETSEGKAAFLAMVAPVIH

SEQ ID NO: 5524 - protein, 341 aa, Enterococcus faecalis
KKKLGSKRSVFMSILVLGGAGYIGSHAVDQLISKGYAVIVVDNLLTGYRSAVHEQATFYEGDIRDKAFLRSVFEKESIEGVLHFAANSLVGESVEKPLMYFNNNVHGTQIALEVMQEFGVKHIVFSSTAATYGEPKAMPITEETPTNPKNPYGESKLMMEKIMKWCDNAYEMKYVALRYFNVAGAKKDASIGEDHTPETHIVPIILQVALGQRAELSIFGDDYDTPDGTCIRDYVYIEDLIAAHILALEYLKNGGESDVFNLGSNNGYSVKEMLDAAREVTGQEIPATIAPRRAGDPSTLIASSEKAKRVLGWQPEVTEVKDIIATAWQWHQAHPHGYQEK

SEQ ID NO: 5525 - protein, 619 aa, Enterococcus faecalis
KNRVGDWMKIAIVGAGPRGLSAAERVIEWARKTEINVQLTLFDPYGPGGKIWRAEQPNYLLMNTVISQVTLFTDESFSGEGPIVKGPTLYEWTQTEAAQYIQQQQPYNYLELLKECHRLGPNDHCSRAFYGMYQKWFYTYLATRCNEQTSLTFFKEPVTAVRAGEDNYYVYTQSIEFTADKVILALGHQENELTTVEQELADYAKEHRLFYSSPKNAADALLALANIPAKQPVVLKGLGLAFFDYLSALTIGRGGVFSRQNGRLRYEPSGREPIIIAGSGRGFPSHPRGNNQKGYGETYQPVFLTETYLAECRKKGQVTGAEFFGYLKKEVEYVYYTCLIEEKYPHLSKEAFQQLFIQTKGAPESLAHFEKQDWFDWQALEHPETKKTTHESFRSFLLEYLKWDIQEAEKGNLSGPLTTALDSLKDLRDQIRFVLDEGLLTNDESQKWLWHWFTPLNTFLSVGPSVERTEELQALVELGLVTILGPEMRVEMKAGQFITYANLFPENRYNSHFLIEARIPKVNNEKSLNPLTRQLLADKLATLHQLALADGQIVKTGALLIVPATNQVMTKDGQVATGLFSCGIPTEGIHWLTAAAARPGVDPWNMRDMDRIAATIFNS

SEQ ID NO: 5526 - protein, 118 aa, Enterococcus faecalis
RQMIQIKRAYEAPTEQDGYRVLVDRVWPRGKSKESEKLDEWLKEVAPSTELRKWFNHEANKYPEFKQKYQEELKHEPTATAFKQLQTIVKNQPVVTLVYGAKDTVHNQAVVLKELLEK

SEQ ID NO: 5527 - protein, 137 aa, Enterococcus faecalis
RGLFRMSILWVINGILLVIVLAMVFNELYLKIMVKRSAKMLTEEEFKETMRKAQVIDVREKDTFDAGHILGARSMPYSMLKTTIGSLRKDQPVYLYDQKKALSIRAANLLRKNGYTDIYILKGGYDGWTGKVKKRNS

SEQ ID NO: 5528 - protein, 323 aa, Enterococcus faecalis
MDKKIIGIDLGGTTIKFAILTTDGVVQQKWSIETNILEDGKHIVPSIIESIRHRIDLYNMKKEDFVGIGMGTPGSVDIEKGTVVGAYNLNWTTVQPVKEQIESALGIPFALDNDANVAALGERWKGAGENNPDVIFITLGTGVGGGIVAAGKLLHGVAGCAGEVGHVTVDPNGFDCTCGKRGCLETVSSATGVVRVARHLSEEFAGDSELKQAIDDGQDVSSKDVFEFAEKGDHFALMVVDRVCFYLGLATGNLGNTLNPDSVVIGGGVSAAGEFLRSRVEKYFQEFTFPQVRNSTKIKLAELGNEAGVIGAASLALQFSKEK

SEQ ID NO: 5529 - protein, 85 aa, Enterococcus faecalis
KIRFTCIIRKCFRMETLYDVQQLFKQFGMYIYVGARIYDIELMMIELKKLYEGQLVDRDTYLQARHILQREHRIEESRGKQKGID

SEQ ID NO: 5530 - protein, 265 aa, Enterococcus faecalis
FLVNNSMSNGNQKRLISQSNNYLYNRRNGMNYQTEMKLKRLKNQPFITYALLGISIIVFLGLELTGGSENILNLVNWGAMVRPLVAQNHEYWRFITPMFLHIGFMHIILNMVTLYYIGAQVEAIYGHWRYLGIYLLSGIAGNIASFAFGTPNSVSAGASTALFGLFGAFVILGRHFRDNPAIMYMVQRYSMFIVINLLFNLFSSSVDMMGHVGGLIGGLLVATAFAVPNREEAFNKHERIMATLIFIFLVVICLLLGFKKYGLPV

SEQ ID NO: 5531 - protein, 209 aa, Enterococcus faecalis
RDFSKRKGESACFLRTLSINLTEKGLKVYMEKNKLRKVGLTALEWLKQHPEIKQHKESSLYEQLFASQQWQQAQTIGMIRSLPLELSTQPIFERAMQESKQVAVPRTFKGGKMHFYQVFPETVYDTSAFGVEEPPLTAAEITATAIDLLIVPGIVFNRAGYRIGFGGGFYDRYLEHFSGHSCSLVFSEQLHEQWQPEAFDQPIEQLFIQ

SEQ ID NO: 5532 - protein, 275 aa, Enterococcus faecalis
  MISC_FEATURE (196)..(196): Amino acid 196 is Xaa wherein Xaa = any amino acid.
GFVYNFLVLPMSNAITYLVDNFNWNYGWAIIFITIIVRIIILPLGLHQSKKSFIQTEKMQAIKPQVDVAQAKMKQASTREEQMAAQAELQKIYKENNVSMVGGIGCLPLLIQMPIFSSLFFAARYTKGIATASFLGMNLGQPNMILVALAGLAYLAQGYISMIGIPEEQKKTMKSMLIVSPLMIVFMSFSSPAGVXLYWVVGGIFTCIQSAITNILLRPRIKKQVQEELKNNPPKQVVTPIKDVTPKETNKVTQKTNQPKANGNKGRNAGKQKRK

SEQ ID NO: 5533 - protein, 68 aa, Enterococcus faecalis
GGTDSMLETTFEQILTQLSKPAVRALTNEKIDSVDELYARGRKALLSLHGFGPKSIRTIEEMTGKELK

SEQ ID NO: 5534 - protein, 706 aa, Enterococcus faecalis
IKTNTYPRRQNNMAKDLLLEIGLEEMPAHVVTPSRIQLEEKVIKFLDEHHLDYETVQSFATPRRLAVKVTAIPEKQADVEEEVKGPAKKIALDAEGNWSKAAQGFVRGQGVTTEDIVFKELNGVEYVYVTKFTKGQSAKEVLTKLNDVITSLTFPVTMHWANYDFEYIRPIHWIVALLDDEVIPFKVLDVTTGQTSRGHRFLGDDVTFQHANEYEAKLKEQFVVVQPNERKQMIVDQANALAAEKNWQLALDEELLEEVTNLVEYPTAFVGSFDEKYLSVPDEVLVTSMKEHQRYFDVRNDQGLLMPHFIAVRNGDNVHLENVIKGNEKVLIARLEDAEFFYNEDKKLTIEACVEKLKNVTFHEKIGSIYEKMQRVALIAQIIGRKVGLSEDELEDLKRASEIYKFDLVTNMVGEFPELQGIMGEKYALLQGEKPAVATAIREHYLPTSSEGELPETAIGAVLALADKLDSVFSFFSVGMIPTGSNDPYALRRQTYGVIRIIEDKGWTFPLVQLQTEVDEAVNQDVEKYGVLLNEGQAEVVEFVKARLRQLLMTKNVRHDIIDAVVSAEQADLSKLFASANILKSRFEDQDFKPSMEALTRVINLAKKGQELLGDTEEGIDPSLFENKAEKELYQAVNDLSEAFATRTIAENYEALVNLRPLIDAYFNETMVMVEDEKVKQNRLKQLMQIAKMALSIASLDLLIVK

SEQ ID NO: 5535 - protein, 323 aa, Enterococcus faecalis
IYIPEAKPIPMSIKNIPRRKTMKNKLTVQEMILTLQKFWSSNGCMLMQAYDTEKGAGTMSPYTFLRAIGPEPWNAAYVEPSRRPADGRYGENPNRLYQHHQFQVVMKPSPENIQELYLESLKLLGIDPLEHDIRFVEDNWENPSMGCAGLGWEVWLDGMEITQFTYFQQVGGLQCHPVTSEITYGLERLASYIQEVESVYDLEWTQGVKYGEIFVQPEYEHSKYSFEISNQEMLLENFDKFEKEAKRCIEESLVHPAYDYILKCSHTFNLLDARGAVSVTERAGYLARIRNMARSVAKIFVAEREKLGFPLLNKDQHVSKEAE

SEQ ID NO: 5536 - protein, 262 aa, Enterococcus faecalis
MALGETKGIILFTKDFKEKDKLVKIFTESYGKLMFFVKGAHRKNNPLLPAILPFTEAVYIGNFREEGLSFLNSSKEVQPFRNIQQDIFINAYGTYILNLVDAAIEDQHYDPNLFQFTHMALSALNEQKDPEIITNIFEIQLLERFGVRPEWHHCVACGETQGKFDYSSKYSGVLCEKHWHLDEQRYHADPRAIHFIRLFSQVSYEKVQNIQVKEETKKSIRETIDMLYDEYVGLHLKSKKFIDQMKTWENTLKIPPRKKEEK

SEQ ID NO: 5537 - protein, 320 aa, Enterococcus faecalis
FYLYQKFYKSFKCGNKRRNTMTTEHKSGFVAIVGRPNVGKSTLLNRIVGQKIAIMSDKAQTTRNKIQGIYTIPEAQIVFIDTPGIHKPKHRLGDFMVESAYNAMREVDATLFMVSADQKRGKGDDFIIERLKNNNSPVYLIINKIDKVHPDDLLSIIEDYSKQMDFKEIIPISATEGNNFEHLMDVLVEQMPEGPQYFPDDQITDHPEYFIVSELIREKVLLLTRDEIPHSVAVVVDSMKRDENDKVHVQATIIVERDSQKGIIIGKGGKMLKQIGTKARQDIEYLLDDKVYLELWVKVQKDWRDKKIYLQDFGYRKEEY

SEQ ID NO: 5538 - protein, 135 aa, Enterococcus faecalis
MRMALKDEQTGKNKHFINSLEFAWQGIKTVFREERNMRKHVAFGVTAIVFGFLFSLTLAEWLWLLLAVFLVWLAEIINTIFENVVDMFTDFHFHPIGKKVKDMAAGAVLLTAGFAVLVGLILFVPKILQIIQMWK

SEQ ID NO: 5539 - protein, 160 aa, Enterococcus faecalis
LMDITFIDETEKVPTEEIKEIENLLQFAAGFLEIAEDTEMSVTFTDNAGIQMINRDYRGKDMPTDVISFALEDEGEDELPIIFDDEELAELPRNLGDLIISTERAAEQAVEYGHTLEREMGFLAVHGFLHLNGYDHMEPEDEKEMFGLQKEILDAYGLKR

SEQ ID NO: 5540 - protein, 702 aa, Enterococcus faecalis
PLAVGNCHKRVKMERRSTGRENIRANKNIENTYETEQRKKLAAEAVTPEYIYQEDTASVQHNRIDKLFKLIDSANEKVDKEYSNKQAKAKKEETIPAPTVEERVASLKSLFESLPQDEVTFYQSFPNVFYQTIFTLTSEQLDKVRSESLMLVDDAMQNHVRESDLDKIRQEANGKIQYLDITSTMQQVIRYIVNQGIVVNDIANEKRTEELRQKAMNAVQPAMIYQGEIIVREGTQIDAKAVEKLELLGMTSQNTSIFPMVALALAILLQVEVLIFFTKQVTEPSRQRSFIIFYTGAMLISVILMKFFQIFQTEQLMYIPLFYPAAFAPLILNHFVNRRSGIIAAIFQVVFALFIFYNSIGTNSLTVILIMYLFSGFLATVVKRKRMSEQVFPALMWVVVFPVFMAVVLMIYQGMSLTDGKTWTALICASAGTVLSFLATMGLHPYIELLVTDDSMIVLNELSNPNHPLLKQLLEEAPGTYHHSMMVASLSANAVAEIGGRSLLTRVACYYHDIGKIKHANFFVENLPAGAENPHNFLLPEDSKQIIFGHVIDGAKILEEYNMPQMVIDICRQHHGTTLMKFFYVKAKERNPEIKESDFRYPGPRPQTREAGIVSIADTCEAAVRAMDHPTNEKIQAFVHNVIQDRISDGQLDECGLTMKEIRIIEKSLINGLCSTFHSRIKYPKMKAEAEEMKDEQEKRDD

SEQ ID NO: 5541 - protein, 472 aa, Enterococcus faecalis
RARLHFCCGGHGAKSDRFIRKNFSSIQIIVAYYILMTVISYLLFCLPIFREPDSHVPFIDLFFLAISTVSVTGLTTVDINSVFNDRGIVLLEVLFQVGGLGIMMISTVFFILSKRRITLKQRQLIMTDMNQPRLSGIVRLIRTTFLILIWFQVIFGSLFSLYFYISGYYTNWRDAIFYGFYQAISAVTNSGFDISGDSIIPFAHDYLFLLAIMFLIFIGGIGFPVLLEIHEWLHFKKKNFRKKKRGLPFRFSLFSKIALLAFIVLFIGGTILIYLLEKDHLFLTMNESGRWVSSMFYSMTTRNAGLQINDLGDFQITTLIIFSVLMFIGCSPSSVGGGVRTTTVAIIGLYLLAFLKSEDDISVFSRKIDDDDVKKSIVVFMLSLIMCFFAVVFLSATENLPLISIIVEVASAFGTTGLSLGITDDLTTVGKLMIALLMFIGRIGMLYTLMIFVPKETRDLGYEYPSEKIIIG

SEQ ID NO: 5542 - protein, 1199 aa, Enterococcus faecalis
SVCQNTKNNSHKQCLGKIKGEKMKKTMDGNTAAAYISYAFTEVAAIYPITPSSTMAELVDEWAESGLKNIYGQKVQVIEMQSEAGAAGVVHGSLKTGALTTTYTASQGLLLMIPNMYKIAGELLPSVFHVAARAVTTSALSIFGDHGDVMATRQTGFCMLAESSVQEVMDLSAVAHLASLEGSLPFVNFFDGFRTSHELQKIEVIDYDDLKEMVNQEAVTRFRMGGMNPNHPTVSGTAQNPDIHFQQRETVNKNYEEMPKIVQKYMKKINNLRGTTYDLTDYYGVEDATEVIISMGSASPVIKQTVDYLNQQGRKVGFINIHLYRPFPTENLLEKLPATVEKVAVLDRTKESGAEGEPLLLDVQSALYQHENRPIVIGGRYGLGSKDVAPNQIKAIYDHLLLPFKELKQRFTVGIVDDVTYQSLPEEPTLDLTPDTTFQAKFWGFGSDGTVGANKQAIKIIGDHTDLYAQAYFSYDSKKSGGLTVSHLRFGKEPITSTYLIEQADFIACHNASYLHKYDLLKGLKDGGTFLLNTICDQEKIHRLLPAKLKKYIGEHQIKFYIINAVELARKVGLGRRINTVMSTAFFEVTDILTKEQYLPLLKEEVKKTYGKKSMEIVEKNYQAIDATFESLQEIVVPEDWATIVLEPENQESEAPAFVTNILEPINRQEGDQLTVSDLIENGMKGGAIPMGTAAYEKRGIALEVPEWQMDKCTMCNECAFVCPHAAIRPFLADEEELKEAPAGFAMREMRGTDGLMYRIQVSLEDCTGCGLCVQACPVKDKAILMKPYETQKEQAMNWAFAMTLKQKANPVKKLSVKGSQFNQPLMEFSGACEGCGETPYIKLLTQLFGDRMMIANATGCSSIWGGSSPVTPYTTNECGQGPAWSNSLFEDNAEYGYGMYIANRTKRQHLASLVEESLAKNVGSDSLQALLNDWLEHMAEGEGTQQRATKLAAALSEEADEDPLLTKIYEQKDLLVKTSQWIVGGDGWAYDIGFSGIDHVLASGEDVNIFVMDNEVYANTGGQTSKATPASAIAKFSAGGKHTSKKDLGMMAITYGNVYVAQVALGANSMQTIKAIDEAERYPGPSIIIGYTPCINHGVKGGMVRTLDQAKEAVESGYWPLYRYNPELVKKGKDPMVIDYKKTDFDKMRDFLEKQTRYSALHTIKQNQEVVEHLLDKTKEDAIERSESYNKLVTHMKK

SEQ ID NO: 5543 - protein, 478 aa, Enterococcus faecalis
KSRWRKMARKSRIKTPIAEQAPTIRKNNFEEVCLGYTLAEGQEEAIRCLQCKNAPCIAKCPVMIDIPGFILAIREGNMEQAADILSKYTNLPAICGRVCPQEKQCEQVCKLGKAKNFEPVAIGKLERLVADWALENHKFPKKTAEPTKGKIAVVGSGPSGLTVAGDLSKLGYEVIIFEALHEAGGVLTYGIPEFRLPKKIVKQEIASIEALGVTIETNVVVGKTITMEEIMSEFDACYLSVGAGAPNFMGIPGTSLNGVYSSSEFLTRINLMHSYEFPEYDTPIKRAKNVVVIGGGNVAMDAARSAKRLGAENVNIVYRRSLEELPARIEEYHHSLEEGINYYWLTNPIAYLDDQQGNLAGVECVKMVLGEPDASGRRRPEPIPNSTFTIPADAVIEAIGQGANRVLLSTYPEIELNQWGYIQADPKTGATSIPGVFAGGDIVTGAATVILAMGAGKIAANAIDQYVKTQKTTVTSNV

SEQ ID NO: 5544 - protein, 98 aa, Enterococcus faecalis
SLVCYLAGLAWKRTLLNLILRSHQQFPKIKWINPKTYFDLKMAPGAKQTVEIQLRNDTDEDITIENTVNSATTNLNGVVEYGQNGIKPDKNLTFLLKR

SEQ ID NO: 5545 - protein, 165 aa, Enterococcus faecalis
NMAKTGSNLTKTLRFYLKDDVEAPKEIILPKHSPKTLPLTITMPKDSFDGVMAGGITLKEKKKETTTSADQSKGLAINNEYSYVVAIILQQNETKVQPDLKLLGVKPGQVNARNVINVSLQNPQAAYLNQLHLINTVSKGGETLYQSDTEDMQVAPNSNFSYQFL

SEQ ID NO: 5546 - protein, 68 aa, Enterococcus faecalis
  MISC_FEATURE (8)..(65): Amino acids 8, 45, 60, 62 & 65 are Xaa wherein Xaa = any amino acid. 1
LPISLKGXAINARKICLEINGLWCKKIKGHYQVKGAMVEKRVLYXWEIYKKITISGGRPXEXNEXELP

SEQ ID NO: 5547 - protein, 493 aa, Enterococcus faecalis
RRVELVDKDLRSIQETRNLIRKAKEAQQVLATFSQKQIDAIVQAVSEATFNQREKLAKMANEETGFGIYEDKIIKNAFASKVVYDEMKDKATVGVIHDDAAKKVTEIAVPVGVIAGLIPSTNPTSTVIYKALISLKAANSIVFSPHPNALKSIIETVEIIQKAAIAAGAPEGCVSVIKTPTMQATSELMKNKETNLILATGGNAMVKAAYTSGTPAIGVGPGNGPAYIERSANVPHAVKQLWIQKLSITYNLASEQSIIVETVNREAVKEELIKQGAYFLSPAEADKLAKFILRPNGTMNPQIVGRSVQHIASLVGLSIPKDRRLIVAEETHVGLKYPFSREKLAPIIAFYTVENWEAACALSIEILKGEGAGHTMGIHTENKEVIREFGLRKPVSRLLVNTSGTLGGIGASTNLVPALTLGCGAVGGSSTSDNIGVENLFNLRRVAYGVRDLEEIRQEFGQTSTTSVATSCETTNQEELVNAVVAQVLARLN

SEQ ID NO: 5548 - protein, 172 aa, Enterococcus faecalis
MKALGMVEVKGFLGAISVADAALKAADVTLLKAEIINGGLTTVELIGDVAAVQAAVEVGTEVAKELNCLIAHHVISRVDAQTEVILSDPEPKSAPEPMEQVEVIEEEIETPDLEEHTGTRQKLETQRVVDLRKQAYKMNLSSLKKSEIKFANKEALIQAIMAEIERSEDEWN

SEQ ID NO: 5549 - protein, 226 aa, Enterococcus faecalis
KKLNKGGFLMKNDRLGANVLSMKVIPNVDPALAKELSLKPEHRSLGIVTSDCDDVTYVALDEATKAADVTVVYGKSMYAGAANASTKLAGEVIGIIAGPSPAEVNSGLSVITQVIEEEASFYSANEDDSIVYFAHVVSRTGSFLSEQANIPEGEAIAYLIAPPLEAMVGLDAAMKAADVQMGVFYGPPSETNFGGALLTGSQSACKAACSAFEQVIQNIADNPLSY

SEQ ID NO: 5550 - protein, 310 aa, Enterococcus faecalis
INEVRIQMNEKELKEMIAGILTEMVADNQAVSTATVTAEEKPVTTHVTETTEIEQGLIPDITEVHLRKQLLLKNAVDPEALLKMKAFSPARLGVGRAGTRYMTSSTLRFRADHAAAQDAVFSDVSEDLVKEMNFISTKTICNSKDEYLTRPDYGRQFDEENSEIIRKNTTPKAKIQMVVGDGLSSAAIEANIKEVLPAIKQGLNMYNLDFDNVVFVKYCRVPAMDKIGEITDADVVCLLVGERPGLVTAESMSAYIAYKPTVGMPEARRTVISNIHKGGTPAVEAGAYIAEIIKKMLDKKKSGIDLKEAE

SEQ ID NO: 5551 - protein, 461 aa, Enterococcus faecalis
LKRSDTKMILKTKLFGKVYQFTSVKEVLAKANEEKSGDKLAGVAANSAEERVAAKVVLSELSLNDLFNNPVVDYDEDEVTRIIIDQVNMRIFESIKHWTVAELREFILSSETTDFDIKRISRGLTSEMIAAVCKLMSNMDLIVGAKKINIEKTANTTIGRPGTFSNRLQPNHPTDNVDGIMASVMEGLSYGAGDALIGLNPVDDSTESVKRILNKFEEFRSEWEIPTQTCVLAHVTTQMEAMRQGAPTGLVFQSIAGSEKGNTAFGLNAEILAEAQDLALHSGQAAGPNVMYFETGQGSELSSEANFGADQVTMEARCYGLAKKFDPYIVNTVVGFIGPEYLYDSKQVIRAGLEDHFMGKLTGISMGCDVCYTNHMKADQNDMENLAMLLATAGCTYIMGIPHGDDVMLNYQTTGFHETATIRETLGLRPIKEFEEWMEKMGLMENGKLTSRAGDASVFIK

SEQ ID NO: 5552 - protein, 486 aa, Enterococcus faecalis
  MISC_FEATURE (415)..(415): Amino acid 415 is Xaa wherein Xaa = any amino acid.
VPFCMQKEASQAMSKETLLTVGIDLGTSTTQLVLSELTVENFASAFTVPRISISDKKVIYRSDIIFTPLLNQSEIDAEPIKAFVAEQYRQAGIHKQDIQMGAVIITGETARKSNANNVLRALSGYAGDFVVATAGPDLESIIAGKGAGAQTYSETKRKPVVNLDIGGGTTNLAVFKDGEVIDTACFDIGGRLIKLDQQQKITYIAPKIQEIINKKGLTLHLGDQATEQNLLPIISELVAVLENSIGLGTQSPFYQLLVTNHPLRKGEELPIVTFSGGVADCLNTTSTNLFKYGDIGLLLGKYLRKSLIFSEKEVLESAETIRATVVGAGSHTGQISGSTIAYGEQILPVKNIPILKLAPEDETLTVTELGQRIQEKLNWHRIEETPQIALAIRGMSNPTFADIQRYGQGIVEGLXSLVAEQIPIIVMVDEDMAKALGHALSAHLPKDYPFICLDSVKVENGDYVDIGLPVAEGAVLPVIVKTLVFN

SEQ ID NO: 5553 - protein, 477 aa, Enterococcus faecalis
MKRLEQLCHQYTNLSESDIKELQRTARYLSSTTLYQSADVFIDVYKEMSQQALVVYHKPPAKTTSLYSGDVVGMEALLKNEPGVLRTMQTSLNSIGLLAVTQENRLIKQNIYPIRNEHRTIGVIIVEIAADEEIQADLQKEELNNCQLAKVAKSTSQVDALFIDQLAEAVLIFDAAGHLLITNHNAQELYRKLGYRDNIIGMSYDNLSIDYTTFEYVLYQMKYKMSNQPIESKTTYLNYYFKVRKVWLASEEQLIMIIQDNTEFKEKEAEIISKSVAIREIHHRVKNNLQSVVSLLRIQERRTQSPEAKKVLHESVNRIMAIAATHELLSKQVKDDVALRQTLEAVMYNFRHLFQGAQPIEMMMDVDPAIMVSSEQMVTISLVVNELLQNIFDHAFEPQTSGVVKLSGTLDNKMITITVTDNGKGYDVHQSNETSLGLMIVKSYVKDKLKGKITIESNKQGTKTCFYFEQNTSDVVH

SEQ ID NO: 5554 - protein, 197 aa, Enterococcus faecalis
KDKGVKKMDGRIVIVDDEPITRLDIRDIVIEAGYEVVGEAADGFEAIEVCKKTQPDLVLMDIQMPILDGLKAGKKIVQDQLASSIVFLSAYSDVQNTDKAKKLGALGYLVKPLDEKSLIPTIEMSIERGKQTQLLLSQIDKLSLKLEERKIIEKAKGILVKENHISEEEAYQMLRTLSMNKRARMSEIAELIVMDDE

SEQ ID NO: 5555 - protein, 148 aa, Enterococcus faecalis
  MISC_FEATURE (9)..(10): Amino acids 9 & 10 are Xaa wherein Xaa = any amino acid.
NLRAKSSLXXSESGTFTFFIEDFLFAKLKERVWLEEKQRMIQEYVPGKQVTLAHIIASPNKEIYTKLGLPEGTSNALGILTITPSEAAIIAVDIATKSGDIQIGFIDRFSGSVVISGDVSSVEAALQAVIEGLQQILNFSVTCKITRT

SEQ ID NO: 5556 - protein, 140 aa, Enterococcus faecalis
SNPVVKSNEVRTSIMRINRSFPIEKLMAAIDEYIEKTNRRVTFEYIMLSQVNDRPEHAQQLADLLRNKKKLSYVNLIPYNPVSEHDQYSRSSKEAVLKFYDVLKKNGINCVIRKEHGTDIDAACGQLRSKQMKKEKVKNQ

SEQ ID NO: 5557 - protein, 62 aa, Enterococcus faecalis
  MISC_FEATURE (56)..(59): Amino acids 56 & 59 are Xaa wherein Xaa = any amino acid.
LFKKVEILLRFFSLNEMRESMEKKQLTREKTTCGALSTVMGTVIGAGVFLKTANVXGTXTVS

SEQ ID NO: 5558 - protein, 419 aa, Enterococcus faecalis
  MISC_FEATURE (12)..(16): Amino acids 12 & 16 are Xaa wherein Xaa = any amino acid.
LALVFSLKLQMXLGHXLSASLAIFAWVLGGALTISAGLTSAELATAIPETGGAVKYIEYTYGKLAGFLLGWAQSIIYYPANISALSIIFSTQLINLFHLSANLLIPIAILAGTSITIINLLGTKIASLVQSTTLVVKLIPIALISLVGLFTPGQVAVSLFPVETTANTGFLVAFSGALVATMFAYDGWLGVGNVAGEMKRPERDLPKAIIFGLLLITLIYALINFVFLKTLPIEQIAGNLNAASDASVAIFGPIGGKIVTIGILISVYGALNGYTMTGIRIPYALALDNLMPFSRQFQKLSKRFVVPYVAGIFQLAVAIIMMFFGTFDLLTDMLVFVMWLFNLLIFLAVFILRKREPELKRPYKVPGYPIIPIIASLGGIFILVTTSITQPILALIGIGITLLGIPVYLVNKQKTKPKT

SEQ ID NO: 5559 - protein, 86 aa, Enterococcus faecalis
ANMVATKAPLKATKKPVFAVVSTGKSETATCPGVNNPTKEIKAIGISFTTNVVDWTKEAIFVPNKLIIVILVPARMAIGINKFADR

SEQ ID NO: 5560 - protein, 63 aa, Enterococcus faecalis
LMSQFFYIFSHSFPPLTNKLRIYFMISAKKRTFTIKMKVLFLKFALSIYLPQNSGTPRHLVLY

SEQ ID NO: 5561 - protein, 322 aa, Enterococcus faecalis
MTENVKKLAHQLIEWGVLHGAQDVYFLPNDTEIAISFRTGMQRTLYTQVSAEIGEKLIFHFKFIGGMDVGERRKAQLGATTYLIGETKQRLRLSSVGDFQNRESLVIRFLHRFGEQAEHFFFPHQLNEIEASCQKRGLYLFSGPVGSGKTTTMYRVAKQRSGEQQVIAIEDPVEIEEKQFLQLQTNEKIQLTYEALIKVCLRHHPDILIIGEIRDGETAQAVIRAALTGHTIFATIHARNLLGVQRRLIELGGPEHELAECLQGIIYQQILTTTINKEQVAGILYDYFFFKEAVIKSSWQKNLRKAWAYGFITEKTYFQAIE

SEQ ID NO: 5562 - protein, 353 aa, Enterococcus faecalis
ERRGRMGLLQKKRIFKPSNKLTKKQQQLFLKLLADLLANGFNIQESFSFMKKSNALPQHSITFLVEGFSSGIALQALVEELGFSTMVSAQLSFATAHGDLVGTLQAISEHFFQTEKYRQQFYKIISYPLLLIVFLILVIVGIRQFLLPQLMENDANSYSKNIGILLIVYSPYILVTLVFVLSFSFFILNRYLKHQSAIQRAFVYLKLPIIRGLYREYVSAFFALEWGKLLAQGLEMKEVIDLMRHTTNYPLMKELAGAISEGLLVGETLHRQLAAYPFFTKALGLMIQQGEVKGKLGKELMVYSNVCFQGFFKKIERVITLVQPLIFIIIACLIIGVYGAMLLPIYGNMEGVL

SEQ ID NO: 5563 - protein, 75 aa, Enterococcus faecalis
FLHFKPLFEASVCYSAGLRISETANYPWPLSGIRQCFFCTRMGEVACTRIRNERGHRFDAPYNQLPLNERISWSN

SEQ ID NO: 5564 - protein, 129 aa, Enterococcus faecalis
TSHYSRSTTYFYHNCLFNYRCLWGNVAAYLWQYGRSFIMKKKQKYAGFTLLEMLIVLLIISVLILLFVPNLAKHKETVDKKGNEAIVKIVESQIELYTLEKNKTPSLNELVNEGYITKEQLDKYTAEKQ

SEQ ID NO: 5565 - protein, 172 aa, Enterococcus faecalis
IYSRKAMNKSAGFTLMETLVSLTIVCFMTMLPTLAIHRWQETLKIEQFLATVEKQLRFAQQQAIVLEETQEVWFFEEQQSFSFPDKLNPFQFGGNLMPHPQKKRRGPPPKKLFFFFLGEAPRGGKKKYRGGGGGKKKKNFFIGGGGGGEKGVKISMVLNVFTTGLPQITSSQ

SEQ ID NO: 5566 - protein, 398 aa, Enterococcus faecalis
AYFVTPILPQRKGRENMAKLNWSKKYKYVFSYSNKKGTFWGYRYPYYNSLKHRKEASKRGFESERAANKALLKIQYDLETQNTSFVENKQLTIDEWIKVWIPYAQDNWSVSTKQNIESAVKFHISPLIGNQKLSSLNKITYKREFIDKLRQENKYTESTIQTWHKIVMRMINAAVHNQIIPSNTLTGFKFDLSNNVRSFSKKELQRFVAVLENEDIQTQVIFLTLLKSGMRKGELMGLRWSDIDLTEKYFDINSTRGDYGENKPKTKTSIRKVYFDNSLLTLIKKYKNHEKERLFREGIILSDKDYFILSSRNLPIKQSRITYMFRLLCEKAEVQNITVHGLRHTHATFLIEAGANIKYVSTRLGHKNINITLDVYSDVLKEEEKETADMMDKLIENL

SEQ ID NO: 5567 - protein, 88 aa, Enterococcus faecalis
PERVRYFYCNNSRFFISNSCFVIMPSSNKALNFLISSAEDNTVLSLLLELVFSIWSSFAINSLYLSIKPLPIIESVFVSVVINIYFTV

SEQ ID NO: 5568 - protein, 218 aa, Enterococcus faecalis
SLLIKLTTKMEEYSMFLFGNKEDKKVKKAEEKQIKEYFKNNHDIVIGGIYFNDSDKKIFIPKSISESRKQQVINYDDLISYTDIFVGGNIKKHHGITRAVVGGVLAGPVGALVGAGTGGKEFTSIKQLGVMLHLPNNQTVKYMLITTETKTDSMIGKGLMDKYNELIAKLDQILKTNSSNKDNTVLSSADEIRKFKALLDDGIITKQEFEIKKRELLQ

SEQ ID NO: 5569 - protein, 225 aa, Enterococcus faecalis
NQDLKINDWMTPMYLDYDTYFEYHDQTYIIIEKVANYYGIELKELRWKHYKDYMIDVENVDIIPYSFGDVSRKIFSGNIIKFHDKCGISYNPTMVKGRQNFSILHESAHYFFDMNKECKSQSFSDLITGKGYTSEDEPKEIRANIFASLALINNEALKECLKKQMSFRQICEEFEMSAAALHVRLYDFLTKIFLLNPCLARSAINQYRYNYNSTKLISYIKMCLC

SEQ ID NO: 5570 - protein, 113 aa, Enterococcus faecalis
VDLYEKIKLLASEKKMSIRQLEETLGFGNGVINRWRKNTPGSDKLKKVADYFNISVDYLLGRTDNPNSNNLEEDEITTFFRVNTEDLTESEKDQLREELKEYLEFMKSRLKNK

SEQ ID NO: 5571 - protein, 82 aa, Enterococcus faecalis
FYKFYLINLQKILKKGETNMPDTTAGRAKIREYFDDKKISLTSVATYFNIHKQDLNDYLSGKNQSKKAHETLTAIIEYYKIR

SEQ ID NO: 5572 - protein, 108 aa, Enterococcus faecalis
IGVFRMENFLDTSSKNFLYNIIEKILRKMFEQVINEASQGLNERAEYLDIKQLSSMYSMSVPEVEQNFVKDKRMQMIEKRKPGTSKGKRYWPAKEAIKICNDIMNHWD

SEQ ID NO: 5573 - protein, 252 aa, Enterococcus faecalis
IIGIKGKDDTETMDNLVIMKNQQAVTTSLQVAETFNKNHRDVLAAIDDLKEGVAENYAGLFYEDSYIHPQNKQKYRQIIMNRDGFTLLAMGFTGQKALKFKLKYIEAFNQMEELLKTQSNLPINNTELLLEAALKHERGLTLVNQRLDKLETETTINRSQQRKIQGLVSSTVIKVLGGKKTLAYQDSSIKQSAFSNCYKQLKALFDVASYVDIPKVRYEEAVALIPRWKPNLELQARIDMANDNGDMFKEIG

SEQ ID NO: 5574 - protein, 67 aa, Enterococcus faecalis
KRGVKMFFVIKKASNKKYYFVIKTEENEVIASSKTYYYKSSVLEIIESIKSDMDQKAIIVDTTFNWG

SEQ ID NO: 5575 - protein, 113 aa, Enterococcus faecalis
CDYFIFFGFNYKIVFFIRSFLYYKKHFDTPLSTELYQKNYRRVNMKAIREARLIGALLLMIALGVLLKSHFSVPVLATISVPLFIRWFFNWDEAEYQHFQKRQNKKPQSSAND

SEQ ID NO: 5576 - protein, 117 aa, Enterococcus faecalis
GEYTKMNDKIQKLIKKLAKECQKEDVALSLAAIDLEGEMAISQVGKGTIVAIAAHSQYTLTKEKLEQSDCDCPKHRLLKEMYGTETETTTKNTHTFVTDDPNDLMDILSKIFRGEFK

SEQ ID NO: 5577 - protein, 217 aa, Enterococcus faecalis
  MISC_FEATURE (25)..(37): Amino acids 25 & 37 are Xaa wherein Xaa = any amino acid.
VHQTADEYQQEVVVSHVPQVKKHPXNFHIQWFNEEQXRAAIQQLQLPERQAEDLAEKAQLSADKINRGLARLSFNYPFEVATRTTSYQSVSEIKRVFDDPDNKEIGKIEVREDNTIQAQPLIVNRMIEGDLSKPKFLDTVQAPSAAEIGTATHYLLQLIDLSKQPSYEEVRAVQERLVENKLILPAIAEKMNLEQIVAFLDTALGKLLIQTLATLDQ

SEQ ID NO: 5578 - protein, 944 aa, Enterococcus faecalis
TKMRKEQPKMSKTIPLRPANEQFTDSQWQAVFDGDENILVSASAGSGKTTVLVRRVIEKVKSGVDIDRLLIVTYTEAAAREMKERIQVALQKAMNEEQDPERRRHFSRQIALLPTANISTLHAFCLTVIRRFYYLIDIDPVFRMLTDETETLLLKEDVWDALREQFYAENQEAFYQLTANFSNDRSDDGLTNLIFSFYEFAKANPDPEAWINGLTQAYEVGDQLGESKLFQTYLKPLAVETLQRTLQRYEEMVTLTEGEEKLQKIWYLAQNEKEQTKQFLQFLERNDLESAYNLTELLSFDRYPTVRAEELKPTAEQAKQLREQNKKALNDLKKQLFTLSPDAMKQVLKEATPIVQEMAHVGKQFMEAYGAEKRLKNLVDFNDLEHYTLAILAKNQADGWHASEASVYYREKFDEVLVDEYQDINQLQESILYWLRRPLSTEGNLFMVGDVKQSIYSFRLADPTLFIEKYNQYGQGKEGKRIILAENFRSRKDVLDFTNLVFSQLMDERVGQIAYDESAALVHGFDQFSEAADYSTELLIYEKKATESVEFPELQSPELLIEDKTEGELYVTALKIRELIDQNFLIYDKKLKTDRPITYQDIVLLTPTKKNNLTILDVFKSLEIPVQVNDAQNYFQATEIRTMIALLQLIDNPYQDIPLAAVLRSPIVGLKENELVLIRLANKETSYYEAFLTFNQKMEPTMEEAVVQEKTIRFAESLEKWREQARRNQISNLLWTIYRETAYLDYVGGLPVGKQRQANLYALVDRAAAYEKTTFRGLFQFVRFIEKMQEKDKDLAEPVVLSEENAVRVMTIHASKGLEFPVVFVLDMTKEFNVSDLNERYIFEENLGVGIRYLQPEERVMYDTLPFLAIKQVRLRKLLSEEMRKLYVALTRAEQKLFLVGSYKDQAAMWKEWLKVGDVETLVLPAENRLQSKSSLMNWVGITL

SEQ ID NO: 5579 - protein, 1206 aa, Enterococcus faecalis
RQCKGKGCETMSVQFIRGTAVADLEAPLIQATKQWLEEDAQHEVFYLVPNHIKFEQEIQVLQKLRQLQTTTSDSITSTRLQVFSFYRLAWYYLQHTPFYSADVLSDAGAAMIFRKILVEAEEELQIFRGEINKPGFIQQLFQLYQEMREGNIEIAELYPFLEKQTENPKGQDLQLKFQDLTLIFTRFQLQMSQYGYESAEIIQHLSEYLQTVDLSNVQFVISGYQQFTARELKLIEVLMAQAGSVKVALLLDKQYPHDLPDPRSLFYEAGQTYHQLYQLARQKQIPILSDYVEKKEVLITNPDLQGLNDYWIQSQEHLPPLSTADWRGDGLFLWRAENVKEELTHVATEIRRLVVEEGYRYKEIQVLTRDLDCYENLLEPIFAEHEIPVYVDRDMAMDRHPLVEWIESLFAIHSYNYRYRDVLRFLRTELFMPMNQLATSEESLTDWLNQRNAWRRKVDITENVVLAYGYEGYYWSQEKDWEFIRYDFEAEEQEDVATMEEESNAIRQSLQRLLPSYFQAMISAKTGLEAATVFYHFLLQSGVATQLKMWRLQAIEAGQLETARNHEQTWDALMSLLDEYVTVYGESSFDFTTFQEIFVSGLEGLHYSKVPTAIDQVQVRAMDLTRPGAAKVTFAIGMTEEIFPQKIENKTLLSDEERQTINDTLTENQYLRGTTGRKIAQEPYVAYLVFSSARERLYLTYPSVKDTAQEVKPSPYFKNIQKDLNLPVFEKNETTIFDDETTSLAHISTYRTLIGELTRLKRQRKETQEGLLPFWLNMEKALMNQSIAPLAKQVFESLTHQNIPEKIDEVLAEPLYGKDIYTSVSRMESFYRCQYQYFSRYGLRLKERDVFGLSPAATGEFFHEALDQFFKLLIMNQRNLSELTDQEVNLLAEEVLNSILGDARFSVLTTSSRMNYIRYQLSQTIKKVSWALKRQSQRSGMTTVQTEVLFGQIAAKKGISGLELPLKNQGKIHVRGKIDRIDQLVTPESTYLGVIDYKSSHRKFNMTEAYYGLAMQMLTYLDVALMDAVQLVGQEAKPAGSLYLHVHNPTLSYEGKDDIEQQMLKKYQFDGLLMKDPDLLDHLDTSLQAKQSSLLFPIEESAKEQIKPGRRQEDKFVTEPELGALLSHNRNKFIEAGNQIIGGEVQLNPAYQGKERIACRYCPFRSVCDFDVMLKENNYHRIENLSKEEIMARLLNKDEEGATEDE

SEQ ID NO: 5580 - protein, 189 aa, Enterococcus faecalis
DNKVFGGMSLKSKELIKTVVFFACLALGLFLLRQFVFTPVVVRGHSMDPTLADGERVITLKNTEINRFDIITFPAPDEPDKNYIKRVIGLPGDTIAYKDDTLYINGKEVDEPYLDEFKKALTDGQPLTGDFSLKEKVPADSYFVLGDNRRNSKDGRVIGFIHKKDILGEVKFVMWPFSRFGPIPEVSKQ

SEQ ID NO: 5581 - protein, 107 aa, Enterococcus faecalis
RQANIAIAFAEFLLAESGTIVVESNAGQGRALHFLPKHYISIIPFSKLVPRSTQPAAFYTEKIEKGEKIGSAIHFISGPSNSGDIEMQLVVGLHGPLEVCYVVVMDR

SEQ ID NO: 5582 - protein, 191 aa, Enterococcus faecalis
KEALVITVEKVEQTFNDYAPYRFYLKIVKILSQGLFNGIGSMIGAVNKKIKEVAGNIKEKFKGALGIHSPSRWMRDMIGKNIVLGVVAGIDQEKGTLDKSVKKMTDLPTELPNFSTTGRYINQQGAQTESLAKNKGNATTNIGGDTFNINIQAMGKLNEKQLMDMAKDLVKYIQIVKNRDSDATGGAFGGI

SEQ ID NO: 5583 - protein, 270 aa, Enterococcus faecalis
WIWLKTSLSIFKLLKIEIVMQLGVLLVEFKRGQFFLNGKHSSEFNVFMRERPERLSAGRVVELRERMGNDSIAVDFAYYKNVERTITCYAKANTLQEVSFLEDEISFWLDMGNYSDFIVYFDEHYIYQAIVTSPPKFTGTRKSGVLIPFEFTVSIRPFKKNRIGQYWISNPNQLINTEKYPSEPIIQILGSGDISFFINNQSYSLKAINGDIIIDSEKQEAYRKSGGAFEILDHKTLFKDYPILKCGENNFRWTGKVTEFKVQPNWRRKV

SEQ ID NO: 5584 - protein, 939 aa, Enterococcus faecalis
GSAELEAKGLIPVIFKPGEKDFSTNGLGRLVDATRCEITEEANGKYELEMDYPAISRFSDYFENGYQIKAKPNDLEEYHIFEIKQTFKDTFTNSIVIYAQSRTYKLGNRQVRLVTVDNRNGAEAMKLIEQNMDEPCDIKLYSDINTASSTTFEARNVLNCIAGEQGSLLQYWGGEIKREPFKLSLLRRRGRDNVGTVRYGKDLKGLTIKFDWQSIVTKVLPFAELQSGADGTSQRIYGNAVKSEYISKYPDVYAQYIQFTEDQGVKDIASLNKVASKYFTTLYPGSDKPKVSIELEIEKLTDSEEAKEFAKMRNYNLFDTFTVYHKLYDIDIQTKVTGIVYDALAEKTIKITAGDIQVAFYKQQSQDFQEAIKTLTKKEYMSDFVDYITDLINGVEGGSIRQYPKNRPNTHYYLDTESTDTAKDVIAINHKGIGFSRTGWKGPFKNAWGINGVLNADFIGAGKIKSNIFETSFNSCGDILRMVNGILQAWNNKKKIMELTKKGMEFWNGNSHVGTMGTKGNPFPGLADKNGNPIVSDGNSLLLVADNPQKIIGLSNQSGTGHLITGPTQFFVGNNFNFFGPNGSKAILTVDRLIVGGKEVIPGQNGGGGSGAGTGGYPSEVTSDADKFAWDLWSYLLANGYSKAAAAGILGNVQGEVGPSMNPDTEQIGGPAYGWVQWDGSAYPLVGAPTWNGREYVQRLIAAAGIKQVYRTSLAQAQLINWCMFNGQWLGQVSPLTVDEFKVVSSPKTAAYAFELNFERPAAAHPERQTYAQVWYDKFKDLKASTATGKAGIEHLETLMGKWLGNGQCYAVPAEYSGFMGGCGLGAGTIYGFSHVIGDTSSAADIGEAYDWNAVGWRVIQNPTYQDLVVGAIVNIRRGGQWGTGWTVDPTYGHTGVIYGLNNGRIQTIEQNAEQGQIVAKYDRLYFANSIQSIVIPPK

SEQ ID NO: 5585 - protein, 248 aa, Enterococcus faecalis
QVAKFFFESVIDNKYPIQRSAKIVNAKKGIIQYTFDEYSMQSLHRQEAYFSIHKGDNLIGATQNFSYFVVNAASKTEGEMGSYWQSIEDLIADMNAFINENKGDFTDWMNARKEEFEAWRDAQKTDFTSWFESIKDILKTIDPGGTMLAELMDARVDIQGVRHNSISERLLADMEYLYQKLEKRLYTLEYGEISDLIILQDDAFSLNHETEIVGTVDYPAIDGALVIATVDDTKQNAYVFEKVGEISG

SEQ ID NO: 5586 - protein, 198 aa, Enterococcus faecalis
VVKAKRMMETDENGVERQFYPITHASAVRGLEKIIAGQSKVLSVNGYTGAVIITKADLGLENALTELPYATEETDGIITAEMFQRLSNGEGGVYILPIATADELGGIKVGQLLEITEDGTLSAVKQTDQNFTTELKSKLEELKGYTAGANISISEDGVISATGGGDGGGVNQQYVDQKVQEAIDRIPDITFERVGEVE

SEQ ID NO: 5587 - protein, 95 aa, Enterococcus faecalis
MTDIVKVKQGGTQVFPQTHWNAVEGKPEVLKGEKGDPGPQGPKGDKGDVGPQGPAGQNATTTDVATSIKNGLMSKEDKTKLDGLPAITFEKVGEV

SEQ ID NO: 5588 - protein, 169 aa, Enterococcus faecalis
KGRGSVMTTDIVQLKEKGKPVYLKTHTAAIDGLESYIKKIDADKAYQKITKKEPLWTGAWYGGAAGNGQVPSKSLSQCENGWILQWQEYTKEGALNGACYHFFLVPKQHAQNPGSGGVIFLLHGYYTNLVRKYLYIKDTKITGNDLNASSSDTAGSGSKMFALSAIYEY

SEQ ID NO: 5589 - protein, 117 aa, Enterococcus faecalis
VRFMNTRRKENMKIWIDDIQGYLDGYSTMEQPNKIELEVEKEPTDFFNYRWDGTSLIYDPDNVPEPEPTPPTELELLQKQNAELMKQVSQQNQVIQQTQRMTGELMKQVAELTKGAE

SEQ ID NO: 5590 - protein, 63 aa, Enterococcus faecalis
NKSLNLRKERNKMKTNAFPGFDNIKQLYDWNCYTKQDLVDYVNMNCLTKEEYTKICGEPFSES

SEQ ID NO: 5591 - protein, 79 aa, Enterococcus faecalis
VESRCRMNLTVEQWLAVITFLGGIIFALMKFYHVFSQLEDSMKELKEAVERLNNHEIRISRLEEQNKTLFRGIGGNKND

SEQ ID NO: 5592 - protein, 103 aa, Enterococcus faecalis
ITMKYALADWKSKIKPSLEGLEEIKMINWKSRIKNKQFWLSIIPAVLLLIQVVAVPFGYKFQIEMINKQLLDVVNALFVVLNYPGIVTDPPTPGLSNWKGNNY

SEQ ID NO: 5593 - protein, 378 aa, Enterococcus faecalis
QHSGDYVSFRVFGVVFATIAAVIASQALISGSYTLVSEAIKLKLLPRLKIIYPGSNIGQMYIPAVNLILWLACSAIVLAFRTSTHMEAAYGLSITITMLMTTILLLFYLLDKIPAWSAYLISLFFAAIEVVFFFSSAAKFFHGGYVAVGMAVFLLCIMIIWERGNEIKEATAEQVSLKKYVPQLKALKEDTSVPMYQTNVVFLTSDRVDGEINRNIIYSILDKQPKRANVYWFVNVQVTDEPFTQEYSVDMLGTDFIVQVQLYLGFHISQEVNVYLRQIVHDLMKTGRLPKQPQRYSLTPGREVGDFQFVLIQEELSNVSELKKWDRQIMQAKLAIKNLTTSPESWFGLEYSEVKYESVPLIIGPQRKTHLVERKNRS

SEQ ID NO: 5594 - protein, 258 aa, Enterococcus faecalis
KKKSRILRMYILRTPYPHIYYKRSVSMKITTKQVGARMREARKKKKYTLRYLANKIGLSSGSTISNWELGLNLPNKRYLKKIAKACDTTVDWLLYGDFDRFVRQLLKENFQNKQLLKPPFFTQLMGRLSEEQLSYHDSLKIMIQAQKLQQSFYAFPLTVEAPSHSQESISIYEPTTAEEQSDQSYYHPFILSELHELFTHSQNPELDYSLIIAFLPLLKVDQLTEPQKEVLLAIFKRMNSFKDQTLLNEFFVELQYLL

SEQ ID NO: 5595 - protein, 232 aa, Enterococcus faecalis
QFSSCAMLKMKILKKRRDHMSAKHNHEQHQEKQPTMSHDKMNHMNHDMAHEQMAMSHQHEGMKGMDHSMHMGNFKQKFWLSLILAIPIIVLSPMMGFQLPFQFTFPGSDWLVLILATVLFFYGGQPFLSGARMELQQKSPAMMTLIAMGISVSYFYSLYAFYMNHFTNQAHVMDFFWELATLIVIMLLGHWIEMNAISNAGDALKKMAELLPDTVKRMTEHGEEEIPLQDVQ

SEQ ID NO: 5596 - protein, 487 aa, Enterococcus faecalis
GDRLIVRSGDKIPTDGKILKGSTTVDESMVTGESKTVEKNIGDSVIGGAVNGNGMIEISVTGTGENSYLSKVMEMVKQAQSEKSKLESISDRVAKWLFYIALFVGVLAFIGWLMATKDLSLAFERMVTVFIIACPHALGLAIPLVIARSTSIAAKNGLLLKNRNALEQANKVEYVLLDKTGTLTEGQFTVTGLELMSKQFTREEALKYIGALEKNANHPLAIGIMNYLNKQAVQPYEAHNLQALSGVGLVATVQNQEVKIVNEKEVARLQLTFDETIKTNYQEQGNTLSYLIIAGQLVALLALGDKVKPEAKTFIAELQAQGITPVMLTGDNQTAASAVANYLGMKEYYAELLPEDKEKIVQQYLTEGHQVMMVGDGINDAPSLARASIGIAIGAGTDVAIDSADVVLTDSDPKDILRFLDLAKQTRRKMIQNLWWGAGYNIVAIPLAAGVLAPIGIVLNPAVGAVLMSLSTIIVAANAMTLHISKK

SEQ ID NO: 5597 - protein, 482 aa, Enterococcus faecalis
QGSERGRYMDFKELLSFEHKNMLELLDLLQQEQTFSVLMAAEKLKVSDKTIHCYIQRFEKKQETFKIEGLCKIYTTTKGIVKYRELCVCGLARFRQKFCYFIPEFYILRCLIEERINYAQLTQVLELQESTLRKKFSNIRRWLVNFDIIVRQKHYDLTGNEWQIRQLILCFYLFFQESCLEENREMTRKIITFFELDLNVAQQNHLSWLIYIWEKRYRGGHEISVPNANLFQQTSAFFYLFRVEVLSTSFMSLKEQKALFVILEAHFGGCFGKRARKYFIHEQMKIESLCLKTAIFIMKEIRRNFTQHHFNYQEIHLCRFLSTHMNSLLDGQAWLPAHKQEQTLAARYQQTWHRLQKLIRLLKRLYPVFTSVKERELTSCYFYHILDLFNPILYEKKYIICLLTDFPPEKEQALGQSIKSYFSEKKNITIIHGKPTYQLHQVHLLIVNHLFQMNVALSSKTVVYLPEELSPAFFEKVEANLS

SEQ ID NO: 5598 - protein, 316 aa, Enterococcus faecalis
NEEVRGMDEEDIKMKQLQFGTSDETVSSVILGCMRLNGAENPQQVIETAYDHGITFFDHADIYGGGDCETIFGKALKESTIRREDIFIQTKCGIRQGFFDFSKAHILEAVEGSLQRLGVDSVDALLLHRPDTLVEPEEVAEAFHLLEKQGKVRYFGVSNQTPGQIELLKTAVKQPLLANQLQFGIKHTGMVDQGLQTNMEISGSIDYDHGILDYSRLKQMTIQAWSPYQYGYFEGVFIGNEKFPELNQKLSELAEKYQTTPTGLASSWILRHPANMQVIAGSMNLGRIEEIAKAADIVISREDWYDIYRAAGNVLP

SEQ ID NO: 5599 - protein, 818 aa, Enterococcus faecalis
FAKDEGKKMTKKKLLLVDGNSVAFRAFFALHNSLERFKNKNGLHTNAIYAFNNMFENVMQKEMPTHVLVAFDAGKTTFRTEFYSEYKAGRSKTPGEFKEQMPYIRELLEGLGVKYYELPNYEADDIIGTLANKVDKDEFDVVVLSGDRDLTQLATDTVKVDITVKGVSDIESYTPEHIAEKYDGLTPKQIIDMKGLAGDTSDNIPGVTKIGEKTAIKLLKQYGSVEGVYENIDEMKKSKMKENLINDKEQAFLSKRLATIEVNAPVEVNVEDLAYEGKNLEKLVPFYKEMDFKQFLAKLDITEEPVEMEDILFEVVEDQLTNEMFTDDMALYVEMMEDNYHTSPIVGLAWGNNKKIYTTNNLAVFESQPFIDWLMDETRKKNVYDAKRTYVALNRYVGKMTGIAFDVLLAAYLLDTNDNNADIEGVAQHYGYDAIQSDEAIYGKGAKKGLPEDEEVFFVHLARKIKAIQFFTSKLDSELTEKIQADLLYKIELPLSRILGDMEITGIRVDATRLKEMQVEFSERLKEIEEKIYAEAGEEFNLNSPKQLGVILFEKMGLPVIKKTKTGYSTAVDVLEQLKEQAPIVADILTYRQIAKIQSTYVDGLLKVIQPDNKIHTRYVQTLTQTGRLSSVDPNLQNIPIRLEEGRKIREAFVPREDNWLIFSSDYSQIELRVLAHISNDEHLKEAFVEGQDIHASTAMRVFGVEKAEDVTPNMRRQAKAVNFGIVYGISDYGLSQNLGITRKQALQYIDTYFEKYPGVKQYMEEIVRDAKDKGYVETLYHRRRYLSDINSRNFNLPSCAERTAINTPIQGSAAEYL

SEQ ID NO: 5600 - protein, 1059 aa, Enterococcus faecalis
IRKWREFLLIDVNKFESMQIGLASPEKIRSWSYGEVKKPETINYRTLKPEREGLFCERIFGPTKDWECACGKYKRIRYKGIVCDRCGVEVTRSKVRRERMGHIELAAPVSHIWYFKGIPSRMGLVLDMSPRALEEVIYFASYVVIEPGDTTLEKKQLLTEREYREKREQYGQAFKAAMGAEAVKQLLDNVDLDGEVAQLKEELKTASGQKRTRAIRRLDILEAFRASGNQPSWMVMDVIPVIPPDLRPMVQLEGGRFATSDLNDLYRRVINRNNRLKRLLDLNAPSIIVQNEKRMLQEAVDALIDNGRRGRPVTGPGNRPLKSLSHMLKGKQGRFRQNLLGKRVDYSGRSVIVVGPFLKMYQCGLPKEMAIELFKPFVMRELVQREIATNIKNAKRKIERGEDEVWDILEEVIQEHPVLLNRAPTLHRLGIQAFEPVLVEGRAIRLHPLVCEAYNADFDGDQMAVHVPLNEEAQAEARMLMLAAQNILNPKDGKPVVTPSQDMVLGNYYLTMEEEGREGEGMIFRDMNEAVLAWQNGYVHLHSRIGVQTTLLGDKPFTDWQKERILITTVGKIIFNEIMPVEFPYLNEPTDYNLTVQTPDKYFVEAGTDIPAHIKEQELVLPFKKKNLGNIIAEVFKRFHITETSKMLDRMKDLGYKHSTYAGMTVGIADIMVLHEKQAIIDAAHKQVETITKQFRRGLITDDERYERVIGVWNGAKDEIQQKLIESMEARNPIFMMSDSGARGNISNFTQLAGMRGLMAAPNGRIMELPIISNFREGLSVLEMFISTHGARKGMTDTALKTADSGYLTRRLVDVAQDVIIREDDCGTDRGLEIEAIREGNEIIEPLDERLLGRYTRKSVVHPETGAIIIGADQLITEDLAREIVDAGIEKVTIRSVFTCNTKHGVCKHCYGRNLATGSDVEVGEAVGTIAAQSIGEPGTQLTMRTFHTGGVAGDDITQGLPRIQEIFEARNPKGQAVITEVTGEVIDISEDPATRQKEVTIKGKTDTRTYTVPYTARMKVAEGDIIHRGAPLTEGSIDPKQLLQVRDVLSVDLHHGIG

SEQ ID NO: 5601 - protein, 64 aa, Enterococcus faecalis
VSNLLANGKHHLKEGLTTLGTSNGLRSCNKVAVESTHQSGSDKLVSVFGCFNFLNNVLCFFFHD

SEQ ID NO: 5602 - protein, 734 aa, Enterococcus faecalis
LSQFMDQTNPLGELTHKRRLSALGPGGLTPDRAGYEVRDVHYSHYGRMCPIETPEGPNIGLINSLSSYAKVNKFGFIETPYRRVDRATGRVTDQVDYLTADIEDHYIVAQANSLLNEDGTFANDVVMARLQSENLEVAVDKVDYMDVSPKQVVAVATACIPFLENDDSNRALMGANMQRQAVPLIQPRSPWVGTGMEYKSAHDSGAALLCKHDGVVEFVDAKEIRVRRDNGALDKYMVTKFRRSNSGTSYNQRPIVHLGEKVEKGDTLADGPSMEEGEMALGQNVLVAFMTWEGYNYEDAIIMSRRLVKDDVYTSVHIEEYESEARDTKLGPEEITREIPNVGEDALKDLDEMGIIRIGAEVQDGDLLVGKVTPKGVTELSAEERLLHAIFGEKAREVRDTSLRVPHGGGGIVHDVKIFTREAGDELSPGVNMLVRVYIVQKRKIHEGDKMAGRHGNKGVVSRIMPEEDMPFLPDGTPVDIMLNPLGVPSRMNIGQVLELHLGMAARQLGIHVATPVFDGATDEDVWETVREAGMASDAKTVLYDGRTGEPFDNRISVGVMYMIKLAHMVDDKLHARSIGPYSLVTQQPLGGKAQFGGQRFGEMEVWALEAYGAAYTLQEILTYKSDDVVGRVKTYEAIVKGEPIPKPGVPESFRVLVKELQSLGLDMRVLDIEEAEIELRDMDDDDDDLITVDALTKFAEQQSAKQLEKEAESVVKEEAQDVVQEIETAEDRD

SEQ ID NO: 5603 - protein, 234 aa, Enterococcus faecalis
KKPKKVFIKRNTSPLLAALSKEGLAPKMIWTKRTANGDVLTAQEWLEGRLLHADEIGKRNDVIDVLYQLHHSNLLKDMLKKIGGEVCTPLTMLKEYKRQLPKELKRNSYLKEVITYLYNHLPEYPETSYVAVHGDVNHRNWLVSNNYLYLVDWDSVMVADPAVDLGMILSHYVPRSGWNQWLLSYGLIPNESTVQRIYWYGLFSFLQEIVRHHQEGERRAMTAEILQLKRMFSI

SEQ ID NO: 5604 - protein, 220 aa, Enterococcus faecalis
KKGILNMRVRNRPGAAEYMAKYPQYVVEGPEKWQGKWQERFGNNHPIHIEIGSGKGRFIYEMAKAHPEINYIGIDMQLSILSIALYKLVADPLPNLQLLRVDGEALTEYFAENEVDLIYLNFSDPWPKKKHEKRRLTYKNFLATDEIILKPNGEIHFKTDNQGLFEYSLSSFSKYGMIIERVWLDLHNSEFEGNIMTEYEEKFSSRGQRIYRVEARFVAK

SEQ ID NO: 5605 - protein, 63 aa, Enterococcus faecalis
KHVLLQNKNKHSFILSEGMLVFYYLRKPKLSFLEHRRPIKFWPEWIMVTVNALHNRGKRSLLI

SEQ ID NO: 5606 - protein, 255 aa, Enterococcus faecalis
KKEGLVIMEQKLSESEQYLWHFIETHILEIPDYSIVKLSERANVSTATIVRTMKKKGYEGFTSFKHHLKDKENQNINFSALEKVDRGIRTAILKNEEEVTRTINMIEIGNIEDAIQKIKASRRIIIFARGFSELIAQEMMVKFQLAGKYCELHTDPEIIKNISKKLSKKDVALFVSLNGETQELVVAGKNCYDSEIGTILLTASKHSSLMKYIEIPFVGFKSEGSFFPDYEVRSRLPLSILARILLDAYALRTTT

SEQ ID NO: 5607 - protein, 326 aa, Enterococcus faecalis
KPLHGILRHNKEEKGGTTVTIYTCTLNLAIDLFIETEELVPFVVNRTKEDDIQANGKGVNVSLILKMLGIDNTALGVKAGFTGNYVEDYLKEKEITTDFIEVAGTTRINVFTKVTQDQKEYKLVNKGPKLSEEHVQRFLKKISELRKGDYLCVSGSLPQGVSPSILIEISRICFEKQVFLILDSSYEEILDCLPYQPFLLKPNEEELQEWFHTEVQTKDDYIFYGQELLKRGAKNILLSLGSEGALFMNNEKVLSGNSPTGMVVNTACSGDAMLGTFLAGWHQGLSLEKNLKRSIAAGSSTAFRKGLTDFSDVQELEQQIKIQEEE

SEQ ID NO: 5608 - protein, 248 aa, Enterococcus faecalis
RFKRRNKQMATYQLIAATGCPTGIAHTYMAQEALEQAAKRKGITIKVETHGQIGIENELTPAEIQGAEAVIIAADKDVQAERFAGKRIIDVPVSVGIKEADRLIEEALAGKGSIAAENQAVDELEQETQISSGNVGHSIYKNLMNGVSHMLPFVVAGGVLIALSFAIWGIYSFDPESSQYNATAAMLKSIGDASMGMMVPILSAYIAEGIAKRPGLVVGFVGGLIANTGGTGFLGRILSGFLAGYFIL

SEQ ID NO: 5609 - protein, 231 aa, Enterococcus faecalis
LQRVFKGLPKSLDGLKAIFLYPVIGVAVIGITMSLLADPMKAVNEGMMSFLASFQNSSPLVLGIIVGCMCAFDMGGPVNKAAYVTGTALLAQGNTSFMAGVSAACIAPPLITGFATLFFGKYFDTNERNAGLVNFILGSTHITEGAIPFAAKDPLKVLPIMMLGSSIAAVLTYMFGVQVPAPHGGFLVLPVVTHAVQWVLAILAGSLVGGLLLGFVQKSRIAKQEQSLSKK

SEQ ID NO: 5610 - protein, 160 aa, Enterococcus faecalis
QELGVDGMAFIKENHIFLNQQLQTQEDVFHFLAKKSTELEVAQDAQEVFDKLNEREQEGTTGMMNGFAIPHAKAATIQQAAIIIVTLDQGVEWQSLDNQLTEFVIALFIPDAEAGTTHLKLLSSVARLLLREEVTSGLKQASSPAEIATLLNNQLGEGTE

SEQ ID NO: 5611 - protein, 332 aa, Enterococcus faecalis
SIRRGNRMKKISEQKRKHLENLVDDQGIIGALAIDQRGALKRMMGKYKEVTAQEISDFKVLVSRCLTPETSAILLDPEYGLAAAENRAQTSGLLLAYEKTGYDASTPGRLPDSLDVWSVKRLKEAGADACKFLLYYDVDESEAINERKKAYIERIGSECLAEEIPFFLEIVSYDANNSDSASKEYAKVKPHKVIEAMKEFSKDRYNVDVLKVEVPVNMNFVEGFGTESLYSQDEAQAFFNMQSEATQLPFIFLSAGVSATMFQETLKFAKKAGSSFNGVLCGRATWADGVLPFVQQGAEAAVAWLETTGKTNVEELNQVLRESAVSVFEKIQ

SEQ ID NO: 5612 - protein, 189 aa, Enterococcus faecalis
HCFTLFGESWGIMGIPKEGEFVTIQSYKHDGHLHRTWRDTMVLKTSEYSLIGVNDHTLVTESDGRRWVTREPAIVYFHKKYWFNIIAMIREKGVSYYCNLASPYVLDDEALKYIDYDLDIKVFPDGEKRLLDVDEYEFHSKLMDYPEDIDFILKENVKTLVDWINNEKGPFSPEYVDIWYQRYQQLSKK

SEQ ID NO: 5613 - protein, 68 aa, Enterococcus faecalis
RKRPLLARVCRYLVSTLSTAIKKIADVNSPQKELGALAKMANAPSSKFSDLIGVIVLCSFRSVQCQHP

SEQ ID NO: 5614 - protein, 133 aa, Enterococcus faecalis
  MISC_FEATURE (2)..(2): Amino acid 2 is Xaa wherein Xaa = any amino acid.
SXFRCCPASSTRIRTGTRGIPEEQWKSHEYEAHCIHFVLYTNHVAVATCRLLPLKNGVMKLQRMAVEKAYRGADYGRVIMEAAENFAKEQGYHKITLGAQVTAVGFYERLGYQKTGAPFMDAGIEHYEMNKEL

SEQ ID NO: 5615 - protein, 79 aa, Enterococcus faecalis
EYFIARTFSWYNKIETDSELGGFSMHVAQTKDTMSDLYLDAVRLRQRVFVPEQGVYQKNNGNRMNMKHIVFTLFCTRTM

SEQ ID NO: 5616 - protein, 151 aa, Enterococcus faecalis
LRGGRCDKIKQQQLNKNKGGAAVINRFKESKLFFWSVELLVVAMLLFIASKINFLFAPIGTFFSTLFAPVLVAGFLYYLLNPVVNLLMKTKMKRIYAVLLVFLLLIIALVLILLTIIPKLADQLASLASSMPDFFKQVETWIYEIAELPIF

SEQ ID NO: 5617 - protein, 65 aa, Enterococcus faecalis
FLICTDWDILFNVVCPSLSSRLFVLFTKSCGQSTNEDENETNLCRLTGIFITNHRISSDLINNYP

SEQ ID NO: 5618 - protein, 222 aa, Enterococcus faecalis
LSFNCINGGVNHYCIGHCAIILFYMLKDGDKLVPAIQRFLPEKRKDDIVDLLGQLNQTLSSYISGQAIECLFVGTFTIIGYSLLGVRYAFLFGVIAGFTNLIPYLGPYLGLAPAVLVTIFNEPVKAALCCLVVLVVQQLDGNIIYPNVIGKSLKIHPLTIILILLVAGNLAGLLGIFLGVPFYAICRTIIYYVIDMVKAGRSEKVTNAVLLGNETNTKENNG

SEQ ID NO: 5619 - protein, 361 aa, Enterococcus faecalis
LCLFLSLTIKRGRTLKEYESTASELSTIKERENIMNNADPESQSLIAQLLLLVVLTFINAFLAAAEIAVVSVNKNRVEQKAEDGDAKAQKLLKVLQDPNNFLSTIQVGITLVNILSGASLAETLSSRLAPVLRGGAAAKSLASIIILALLTYVSIVFGELYPKRIAMNKSEEVAQLTSGAVRFLGVIARPFVWLLSASTDLLSKITPMTFDDADSKMTRDEMRYMLETEGVLENEELEMLQGVFSLDTKVAREVMVPRTDAFMVDIQDDVQENINLILGENYSRIPVYSEDKDKIVGILHTKTLLKAARNLGFENIELGAIIQEPLFVPETIFIDDLLYELKRTQNQMANLLDEYGGCCPV

SEQ ID NO: 5620 - protein, 83 aa, Enterococcus faecalis
  MISC_FEATURE (2)..(43): Amino acids 2 & 43 are Xaa wherein Xaa = any amino acid.
KXIRWVNLTMNSDEVDNLYTQVADNEYLVHRRMLIDEFNEVFXTDLHMSDVDTMAGYLITAFRTIPDQGDKPSFEVGQYKLTG

SEQ ID NO: 5621 - protein, 182 aa, Enterococcus faecalis
EWIQMEKTKVSVKEETKKENVQGKLTYEDKVIQKIIGISLEKVEGLLTVDGGFFSNLAGKLVNTDDVTSGVVVEVGEKQVAVDLDIVAEYGKDIYKIYNEMKEIITKEVKNMTGLEVIEVNVNVVDIKTEEQHEEDSVSLQDKVGEATESVSNFASEQTEKAKELASKGSSKAKELTESRVK

SEQ ID NO: 5622 - protein, 237 aa, Enterococcus faecalis
RYIKVNEFLMYSITCKHKIFIGERLLLKLYCGKSHMKVGGESMTKGKKILFSFISLVFGTFLFAVFVHYQFMYSLPIYFIKFEEYPFIGNYIQLYLYWGSVIGMVFILLFILGIVLSPAEVTSVKLNDDKGILEIKKSAIVGIVQSQLDQSNLLRDSKVNVKMYKKKIKVRITGNTSDNLDIINQTNQLVKNIELYLKTFIGLDTSIKAEVVFKNISRSGKNKQKTKTSDLKKEGRI

SEQ ID NO: 5623 - protein, 103 aa, Enterococcus faecalis
KNGKLFGGIPGTINELNLYKLSLHKKKLGKKVAVVINNNTASAAESLLLALKNNPNVKVFGMPSAGYTSVNLGRFFTNQNSDNYWWFVYTVGYYETIKPIKGK

SEQ ID NO: 5624 - protein, 206 aa, Enterococcus faecalis
NIVVYYLLRTMNRMSIKKYLLFYIISTCAIIFVSLTFFFLPLKSIDSRSYEVLHTISQYGVISNKDEWRNILELTRYGRKVTNVDNLNTLVYGVNKHSSVKQISSDKDMDNMETLKLPSISKYEDLTIINIPSVYSNDDNFSIKYASKLTDLIEYTSGNIVLNLSNNYGGLKEPMIIGASSLIPNGMLFSNINNKKEKYPVYLKKW

SEQ ID NO: 5625 - protein, 163 aa, Enterococcus faecalis
SLKKGDANMDITDKENFQKQMDFLKRHNFYQYVYQFRWLFVFIPVLVFFDLIFIDFFWLIIVKGILLMGILISEYYVMYRFFKPIALDEKQDFSSVQLFLNLFIFNALFMFVMLTNFHQVFVGKEFIIFGSFMGGIFTICLKEQLKEYQKLMNQFIDIKKEVH

SEQ ID NO: 5626 - protein, 75 aa, Enterococcus faecalis
TAYLMNTLWRAIMEKLKRKLGLKSRPNLFKQFFEYSHGMLNMTQASCVIFLTKNKQVRNFLSFELYILIIRKCME

SEQ ID NO: 5627 - protein, 190 aa, Enterococcus faecalis
FKKMNNEEQQTKQECRTLKKGAEHIKRQRMFESRSNEIKEGLIDEDTFARHRLTYSNNHLKENLLKSCKKNIDTHIQNLKIYKGNKAHGIFLIEYNEEIALSMAEVISVSDVNHGEPQIFDHYVFSKDKDMLQLLNDYNEEIEFFIVSTKFNGTEVIKVRDIPNIIDSLPYEYIVASNYGEVETEAWVKE

SEQ ID NO: 5628 - protein, 327 aa, Enterococcus faecalis
MKFISPMIFTLLLVIFTLVFELNLVSTAYFSLLLSIFVHELGHLVFGLFNKVRPESLIFGFIKLSWEKQFKVRLNTQWGFFGGLFRYKPTTFNNKKILRLLTGGPIFSLFFTLTFFVKIEFFQYFSLFNFSIFLITAVPFNFNGFMNDGYNIYKLVTKDYIFEMYYIVSNSLLNKYNQSTFLNSNEVCKIIKKNKELPLYVLNTFLLYVIYEYLIDKNNRKLKLIYPILSKEDKILNNKSYLQNFYLANLYMIEYILSVDNKQTFKKINLKILDSISRSRIKYLNFKCSKSADDEISQSMTEFSNIIKNYSDQTSTMIIAEKQWVQN

SEQ ID NO: 5629 - protein, 79 aa, Enterococcus faecalis
KNSIFTKKVNVKKRLNIGPPVNNLRIFLLLNVVGLYLNNPPKNPHCVFNLTLNCFSHESFINPNINDSGLTLLNNPKTK

SEQ ID NO: 5630 - protein, 429 aa, Enterococcus faecalis
RVISFTVLQKTTIWRYKMKKRGLTYILISYIFLTLGTTGYASDLSNNISFFIDNSQTTAIEEIESELSSEKVDYIQEIGLVSFKNLDDSDRKFIGKYFNVSEGKKLPDFKPEEVNSSILNINILNKDFKSFNWPYKKILSHIDPVKEQLGKDITIALIDSGIDRLHPNLQDNNLRLKNYVNDIELDEYGHGTQVAGVIDTIAPRVNLNSYKVMDGTDGNSINMLKAIVDATNDQVDIINVSLGSYKNMEIDDERFTVEAFRKAVNYARKNNILIVASAGNESRDISTGNEKHIPGGLESVITVGATKKSGDIADYSNYGSNVSIYGPAGGYGDNYKITGQIDAREMMMTYYPTSLVSPLGKAADFPDGYTLSFGTSLATPEVSAALAAIMSKNVDNSKDSNEVLNTLFENADSFIDKNSMLKYKEVRIK

SEQ ID NO: 5631 - protein, 720 aa, Enterococcus faecalis
VIRGVIMKRLKYVAQGEHSECALACITMLLNYYGNQSTLVELREKYGVPKGGLTIKNIRTVFDEYGFDVSTFKSSFSNYLDLPTPVISYWNNQHFVVIEKIKKKKVLILDPASNKRWIDISEFKKNFSNILIYAHKKKTKKEGKRKQFFLKSFIFTKFKRYFFSLIILSFVSQLLLLLIPIATKYSIDNIRSFQEIPTYVLLLILTSFFSVLYVVQYLKSSVVAEFQYEFDFKLMFSYIDKLFSMPLMYFSNRSTGELVFRANLNIYIRQILSQKVITTLIDSLFLGIYLFLMVNYSILLTIIALVLISLIAFLSIINSHTIKRFVDKEIMEQGNVQRIITEAIEGIETIKSANAEKSFLLNWKNMFTSQLLITKNKNRYIAIFGILPEIIQSVMPALFLIIGIKLIINNSLSLGSLIGFVSIVTMVMKPILSLVSSYNDFLLLNVYFQKLSEVLTYEEKNDFNNKKGNVGKEEFIYRVNNVYYTISVFEKNILNGISFDIRKGDKVAIVGRSGSGKSTLLKLLAGLLQPSNGEILYEGYPLSNNSNNRRNIFYVNQNAHIFNETIEKNISLEFKPNSSINEKKRLKESMSKSKMDEVLLGIPQYEKTIVSENGSNFSGGQRQKIALARAFYSNVNTLLLDEPTSAMDNISEFEVFSNLLDEKRTVITVAHRISTVRNFDKIILMDNGEIVCIGKHEDLIENSELYRSLYYKKQQFGGTK

SEQ ID NO: 5632 - protein, 67 aa, Enterococcus faecalis
EETKLRIGFITIVTIETKPISDPNDKELLIINLIPIIKNRAGITLCMISGNIPKIAIYLFLFFVINS

SEQ ID NO: 5633 - protein, 155 aa, Enterococcus faecalis
  MISC_FEATURE (2)..(2): Amino acid 2 is Xaa wherein Xaa = any amino acid.
DXVHRLSKFNRIDKANSLLHKIKESYFEEEPKNNSWCKGTVRELLATIELYDDNISNIDINKTIAYKNKDCLCHGNAGTLEGLIQLAKKDPETYQYKKNKLISYMLNDFEKNNTLKVAGSEYLESLGFFVGISGVGYELLRNLDSEIPNALLFEL

SEQ ID NO: 5634 - protein, 60 aa, Enterococcus faecalis
ICRRNNLAKSSRRTSRNLKETSLEKEVEIEVGRFCEKMSQFKLFRTSFSVSFFQRMHHFK

SEQ ID NO: 5635 - protein, 217 aa, Enterococcus faecalis
LEFSHVQGIFITFEGPDGAGKTSVLKEVSERLAKESKRKIVTTREPGGIPIAEKIRTVILDPRNDRMDERTEALLYAAARRQHLVEKILPALEAGHLVLCDRFVDSSLAYQGAGRRIGIAPIASINAFATEGVSPDFTIYLDVDSDTGLRRIQENRTQQIDRLDSEGLEFHQRVRHEYLKLAEENPQRIKKIDARMSLELVVEATYQAIIERYPENF

SEQ ID NO: 5636 - protein, 110 aa, Enterococcus faecalis
TMKIILAIVQDKDSNRLANEFIDANIRATKLSSTGGFLKAGNSTFIIGIDDERVDETLALIKETCQSRKQYVSTPVTLDITMDGQIPYPVEVEVGGATCFVLPVEGFHQY

SEQ ID NO: 5637 - protein, 333 aa, Enterococcus faecalis
AALLASSYQLKDSINIKMNEAQQLQQMQPLLYKQLQKSFEHGRLAHAYLFEGDTGTGKQEFGLWMAKHVFCTNLVNQQPCNECHNCVRINENEHPDVLRIAPDGQTIKVNQIRELKAEFSKSGVETAKKVFLIQEADKMSTGAANSLLKFLEEPEGQILAILETTSLSRILPTIQSRCQTLHFQPLVKKTLIDRLIKQGIGEKTATLLAELTNSFEKAVEISQDEWFNEAREIILQWFNYLKSNDLQAFIYVQKKMVKVFKEKEQQALSFDLLMVYYRQLLEESVATQQAKKVTEEQAERLALILKARQKWTANVSWQNVCEQLVIQMIHPKS

SEQ ID NO: 5638 - protein, 284 aa, Enterococcus faecalis
IRRNKMVEVVGVRFREAGHIYYFAPGKSEYIYNEKVLVESQQSKQLATVAIPKKTVDSDDLPEDLKPILNKATANDLEKEQKNLADAEAAKSIANEKIRAHDLKMKLVRVEYTFDRSKMIFYFTADGRIDFRELVKDLAAIFRTRIELRQIGVRDEAKILGGIGPCGRQLCCSTFLGDFMPVSIKMAKDQGLSLNPVKISGLCGRLMCCLKYENDEYEAAKKELPDYGKEVITPDGKGKVVGLNLLSRIVKVRLHGREIAADYDYEEIKEATAKVAAEKGDQNG

SEQ ID NO: 5639 - protein, 151 aa, Enterococcus faecalis
VGLSKFVCMVVKSQRIMITKKSKKLLRKLLLKKVIKMDKRSLYDGLNSLETDLDSSVTQLREIKAALHELVEKNTTLEIENQRLREHLQELNKLAGNTTETEKQELSKSRMNLEKLYEEGFHVCNILYGSRRENDEECAFCLDVIYGERTR

SEQ ID NO: 5640 - protein, 313 aa, Enterococcus faecalis
QSIDCQIKPLSIYRTKKENEGCAMQKQKSFDKQTTKGKLYLVPTPIGNLEDMSIRCLNILKEATVIASEDTRNTQKLLNHFEITTPQISLHEHNYKERIPQLITRLLNGETIAQVSDAGMPSISDPGHELVTACLEEELAVIALPGPTAGMTALIASGLLPQPFTFYGFLPRKKKEQKDVLSALKEERPTQIFYESPYRIAKTVATFAEVYGQERPAVICRELTKLHEEYLRGTLGELTEYLAENTLKGECCLLVSGFTGEKETIAAMPAISLKEHVQVLMEEEGRSSKEAIKEVAKLRNVKKQEVYKEYHSI

SEQ ID NO: 5641 - protein, 231 aa, Enterococcus faecalis
RISFHLKKERNMSNLLRAEGVSYQVNGRSILSDIDLSFETGSNTTIVGPSGSGKSTFLKILSSLLSPTEGEIFYQEAPITTMPIETYRQKVSYCFQQPTLFGETVYDNLLFPFTVRQEAFNQEKVVALLQQVKLPAAYLEKKIAELSGGERQRVALLRNIIFVPDVLLLDEVTTGLDEESKQIVNQLLNQLNKEQGVTLVRVTHDTEEIQQAQQVIRIVAGKVAPTDGFSS

SEQ ID NO: 5642 - protein, 259 aa, Enterococcus faecalis
QERWRRQMDLAVNNLSLFFSAMLVVVALIISTKEKLGFTKDIIISVIRAVIQLVAVGYLLKYVFQVNNLILTLIMVLVIVSNAAFNAKKRSQQLQKGFLISFIAIGCSTGITIGILIFSGSIKFIPSQIIPISGMIASNSMVAIGLCYRNLDTLFQNQRQAVMEKLALGATIKLASLPIIQQSVKTGMAPTIDSAKTVGIVSLPGMMSGLIFAGVDPVHAIKYQIMVTFMLLSATSIGSVIATYLAYKGYYNQQKQLVV

SEQ ID NO: 5643 - protein, 422 aa, Enterococcus faecalis
STKTIGRLIKKLEICVYNFTDFQLFLVEIKKFQFEKERTFVYNGGRRRIKMMSELRFPLKKDTSRKIIHIDMDAFFASVEERDHPELVGHPLVIARHPSDTGGKGVVTTANYIARQYGIHSAMSAQKAYELCPSAIFKPGNYQKYSEISQEIREIFRRYTDVIEPVSIDEAYLDVTENKVNSKSAIKIAKMIQYDIWHELQLTCSAGVSYNKFLAKLASDFQKPKGLTVVLPEEAEDFLKALPIEDFHGIGKKTVPKMHELGIFTGADLYKQDEMTLIRLFGKMGYSLYRKVRGIHDAPVQVTRDRKSVGKEHTYGTPLTTEEQVTAQLRQLAAGVERALQRVQKHGKTVVLKVRYTDYTTITKRVTLPEYISKKEELFYQANLIWEDILGLEQGIRLLGITLTNLDPLAYENIVLPLWEKS

SEQ ID NO: 5644 - protein, 203 aa, Enterococcus faecalis
KEVLLMRNPKPQEWKTEDYSQKKIADYKAFNFVDGEGVRNSLYVSGCLFACEGCFNKAVQNFNYGTPFTESLMNQIIEDLSHDYVQGLTLLGGEPFLNTDVCLSVVKRVRETFGSAKDIWSWSGYTFEELLLETPDKLELLHSIDILVDGRFELAKRNLNLQFRGSSNQRIIDVPKSLAAGKAVIWEKCHDAETSYEQIKKSI

SEQ ID NO: 5645 - protein, 295 aa, Enterococcus faecalis
RPTECVRSARKSRKVWQILNERLAIVKDALVYRVERVKEAKPANAPILYMYGAFGKRLATQDAVDELFKNKRATVSLGYIGLYEVASAFYGGAWEDNQEAKNFTLDILKELKKNADNWGNEYGYHFSVYSTPSESLTDRFCRLDTEKFGIVENITDKEYYTNSFHYDVRKNPTPFEKLDFEKDYPKYCSGGFIHYCEYPMLQQNPKALEAVWDYAYDKVGYLGTNTPIDHCYACGFEGDFHPTERGFECPECGNHDPKTCDVVKRTCGYLGNPQARPMVHGRHKEISSRVKHLKN

SEQ ID NO: 5646 - protein, 125 aa, Enterococcus faecalis
GTFCLFVSCSELLEKLKMSMNESAKSQAKAQAYITRMKKADVLVLDDLGAELGIKNKVSTDFNNDILNRILEARQNKATIFTTNFSGKQLVEAYGTRIISRLMKHANGYVFQYKDTTDKRMRSVK

SEQ ID NO: 5647 - protein, 131 aa, Enterococcus faecalis
LVKEKAVNMSNLTKRKKDLFEMKSVVFKDISKQQSEKAQKRKRLLQLMNQYPDWASQKNKLIMQEIQELGQAIGNWSMDQSRPIQSIKAASFTKSEYLYLIWLGYSDEAIRHGLDMSKECYFIYRLTLLNE

SEQ ID NO: 5648 - protein, 136 aa, Enterococcus faecalis
PMRTSTFNYIKDILADFYKTEEYIRQREEELRHPYQEADLNAGIRGQGLHSVVTERMAITIAMDRRLWNLERNRDIIKNCLAEADEQTRVIIEELYMKKRPSLTLIGLAQQLFISKSQAYKLRNHFFEAVADELGM

SEQ ID NO: 5649 - protein, 143 aa, Enterococcus faecalis
PILNFLNGKVALKMNEAEQELYEALVAICQTSGFLLLEELPTDLPDQPFVYLGDSKELPKPTKSAILGEIELIMHVYGALSERQQISTIKGTILRQATSNLKRTAHFNWGIKHQEVKAQMVKDTKQMKKTIWHAVLPLHMQFY

SEQ ID NO: 5650 - protein, 174 aa, Enterococcus faecalis
EELSMGEVMQGKDRILLVRRLDEAATKKAMKPLFQIEHEWEFSRESSGTQTKDGVANAVSGLEVTLSLSGLASRDDENLYMKDAVEDGILMEFWDVDLKGEKNAEGKYPAIYAQGYVNSWSLPANVEELVEIETEASINGKPQDGFATVEADIIAEAQYAFQDTVPDKAPQPGE

SEQ ID NO: 5651 - protein, 120 aa, Enterococcus faecalis
KMNLEINGKTIEVKFTIGAIRELDKRYQIENGAAKFGMGISSAMIYLRQYNPVILVDIMEALQSGQLKIGKSEIEAWLMTQDVKKLSDDLLKEMGKQPLTKPMIDQFSKEAKKAEAQATN

SEQ ID NO: 5652 - protein, 157 aa, Enterococcus faecalis
RNGKATSYKTNDRSVQQRSEESRSASDQLIKTSDDVYHDIALSAFRYLGCRSFEEVDQMTMSEFELRMIAFNLAEVDEERKRHELAYLNVKAQATNKKGKPVFESFKSFYDYEKRVAEVLAANQPQRTKLNERKKTQLATVAERLRRYREGRRVDGE

SEQ ID NO: 5653 - protein, 977 aa, Enterococcus faecalis
MENDKEKTPLSEAKKSLAGVQQALKSMSGEYALLSGYLGKISAGVNQSATVMNTFKTVMQQSGETVKKTGDETAKAADQMNTALTDSAEQAGEAAKKAGKETSDGFTNAQNNMLSFGTAMTSAVSLPMLNVLKTAMGVGAGVSGEFQGMQGLIMASAGGISDSLQGELQGALTQMNQSFEAAAQVIQSVMAPGMEILVQVVITVVKGITALVNLFIKLPKPVQVFIVAIMGILAAIGPMLIMVTMAQLKFQQFSAGLALVQGNIGKLGGGLSKLSASFSALGGGPLILIVAAVLAAVAAFIYFYKTNETFRNSINSLASAIQGAVSAAFGKLVGLLQQIQPAFQQVMAVFKQFFAVGLEKMATIFSTIGRVLAGVFASGLQLGSNLLGQFGGTFDKAGLAVGLLVKVLTKVALAALGISGPFGLIISLIVSFVTAWMKTGDLSAGGITQVFDNLGNTITSVTTMLATNLPKVIQLFTTVLTSILGKITEAIPSIVTALSSLITLIVGAIVANLPVLIEAATQIITTLIQGITTVLPMLIEVGLSLLMTLVNAIVTALPTITTAAINIITTLVTAFVTALPMLVTAGVSIITALVNAFVTMLPLILTAGLQILMALITGIMTILPQLIQSALTIILALVTALIGALPQIISAGVKLLMALIQGIISILPTLVAAAITLILTLVNALIGALPQIISAGVKLLMALIQGIISILPQLVTAAITLITALMGALINALPQLLSAGIQLIQALINGVLSLLGALLSAAGTLISQMITKIGSYFGQLLASGGQLVENIKNGVTNAANQVKNAIGSVIEGAWQAIQGWFSKFTDAGANIVGMIADGITGAIGKAKEAIDGVVSKIRNFLPFSPAKEGPLSDLHKLNFGGTIATGIYAGETAVSRAMASILDLPLLNDFALDLAGRGNFTATIDHRLENDAYNRPLFVTVESTLDGKVVAATTAPYLATELQRQQVKQNNRLGRRG

SEQ ID NO: 5654 - protein, 313 aa, Enterococcus faecalis
EGEDNMYKFVDTNQATHSTPLPSEALNFNGQFLEKVIPGYQTLSVSGRELVPSEIESYQLGIRDGKRHVYARIPERELTVKYRLSAVNNEAFRDAFNHLNVALFTEKDVSIWFNDEPEMLWFGSKSSVSDVPEGVNQVTGTFTLLLSDPYKYTRSDATSVMWGSPTITFQANYLMGNTGSGAFDFPILIEGGAYWGSTMITFQNRAYTMGDLGKEVRPIEIYPTVEGLKVKPTIILTGTGRGVWIKTRNDTINLGDFDRSEIIIDTENFYLTKNGAPMIRPMNDFYLYPNEPLYIQAKDSDFRLTIRYPNRFV

SEQ ID NO: 5655 - protein, 345 aa, Enterococcus faecalis
MLMALDLKRTYTAILDNAYQVSYEKIENKIGSLDFTMPLDDPKNEFIAEMQWVELTDNENEYIGLYRVMPTTIKKDANNNQIHYSATEALCTLGDTVLFGCHEIKNKTTKEAIQFLLNKQKTKHWVLKKCDFSRKLTYKWENENGLVEPLFSIPADFEEEYLWQWNTEVYPFELSLVKPPTEPVARIQEGYNMQGFEIERNPKMLINRIYPLGSGEGVNKVNIRSVNQGVPYLENKAAIDRYGLLESIWVEQRFSDPKALKENALRMLEEWTKPQVSWVVTAADLIKLTDKPLAIDRLRLGTVIMINTNEFGSVNLRIKKESKKDVFGCPPRHSARVGKPARNNS

SEQ ID NO: 5656 - protein, 64 aa, Enterococcus faecalis
YHDSFHSETRELRILRPKGANKPFKFLQYRGETYQEPGQWNGFILLNKELSILNTRHITFKATW

SEQ ID NO: 5657 - protein, 100 aa, Enterococcus faecalis
NCIKVEVRCSKMGFTDETVRFDFDDNRKKAISETLETVYRALEEKGYNPINQIVGYLLSGDPAYIPRYQDARNLIRRHERDEIMEELTKYYLANHGIDIK

SEQ ID NO: 5658 - protein, 158 aa, Enterococcus faecalis
  MISC_FEATURE (135)..(135): Amino acid 135 is Xaa wherein Xaa = any amino acid.
NHGRINQILLSEPRNRYQMRIMGLDVGSRTVGVAVSDLLGWTAQGIEIIRINEEEENFGFERLGELVKEYEVTKFVVGLPKNMNNSIGPRAEASMAYGDKIQELFQLPVDYQDERLTTVQAERVLVEQADASRAXRKKVIDKLAAVMILQNYLDAHSR

SEQ ID NO: 5659 - protein, 220 aa, Enterococcus faecalis
IRTTGEKSHISLEERKLSTMNKKILMGLLSVVTIPLLAACQGGETPSAASKNSQTVTTQSSAKTESTSTTRSVAQTTSKEEVKEPMKTYEVGALLEAANQRDTKKVKEILQDTTYQVDEVDTEGNTPLNIAVHNNDIEIAKALIDRGADINLQNSISDSPYLYAGAQGRTEILAYMLKHATPDLNKHNRYGGNALIPAAEKGHIDNVKLLLADGREDRHA

SEQ ID NO: 5660 - protein, 349 aa, Enterococcus faecalis
SFMKKKIVGTITLLALSALLVGGAGGALTAEAYVPQSVDNPNNLGDLPEYLRSVGIRQDEGLSEKDWAGTRVYDRNGNDLTDENQNLLHAIKFDATTSFYEFFDKETGESTGDEGTFFMTAGITDVSRLVIISETKNYQGVYPLRTLYQDTFTYRQMGKDKNGNDIEVFVENKATSGPVYGRPQPYPNNRPRTLEFTNGRRAMTEQTGQIDVNRQGDEIIGKTSFDGTPQLLWNGTKVVDKDGNDVTSANQNFISLAKFDQDSSKYEFFNLQTGETRGDYGYFKVGNQNKFRAHVSIGTNRYGAVLELTELNDNRLTYTRMGKDNEGNDIQVYVEHEPYQGTFNPEFTF

SEQ ID NO: 5661 - protein, 332 aa, Enterococcus faecalis
DRFIKEKERCFMKKKVLSSITLVTLSTLLIAGYASPAFADHAANPNSATANLGKHQNNGQTRGDKATKILSGTDWQGTRVYDAAGNDLTAENANFIGLAKYDGETGFYEFFDKNTGETRGDEGTFFVTGDGTKRILISRTQNYQAVVDLTEVSKDKFTYKRLGKDKLGNDVEVYVEHIPYHGKKLAFTNGREALTNQTGKIVTNKSGDKILGTTLWNGTKVVDKNGNDVTAANQNFISLAKFDPNTSKYEFFNLQTGETRGDFGYFQVVDNNKIRAHVSIGTNRYGAALELTELNNDRFTYTRMGKDNAGNDIQVFVEHEPYQGTYHPAFTF

SEQ ID NO: 5662 - protein, 336 aa, Enterococcus faecalis
IYQKEKRGLPTMKKKKVFSALTLLTFSTLLIAGCAGGANSATDKSSAASSSTAVSSSAEAAKEQSKGQELTEILSSTDWQGTKVYDKNNNNLTAENANFIGLAKYDGETGFYEFFDKETGETRGDEGTFFVTDDGEKRILISDTQNYQAVVDLTEVTKDKFTYKRMGKDKDGKDVEVFVEHIPYSDEKLTFTNGRKDLETETGKIVTNEPGDDILGATLWNGTKVLDEDGNDVTEANKMFISLAKFDNKTSKYEFFDLETGKTRGDFGYFQVIDNNKIRAHVSIGDNKYGAALELTELNDKRFTYTRMGKDNNGKEIKVFVEHEPYEGDFTPDFTF

SEQ ID NO: 5663 - protein, 500 aa, Enterococcus faecalis
KPLGGTLLTIKRRFFISYISAIIITLASVLAVLSLASYITLGTVPSLPQAYRMMNKQRPLTANEEESYLALDQLLKKSPKLLDTPLSKELKETIQTIEAKGLSVIIRKNARFPYYSDNLVEKSLSVHIPNYEMNNIMPTGTLDNAGRLYHYVKSDFHYLDGSNGSFIVLKRESSLFEFFTRWIIWMILLIILVAIAAAWLINKRLTKTTIEPLEALEKATKTLGKDAQKENPFTPTSHQTVSTEVKQLQLSFEQMWQDLEEANAEREKYEANRKELIANISHDLKTPITSIIGYVEGLMDGVANTEEKKQRYLTVIHEKSLGLNDLIEELFLYSKLDLDRAVFTMEKTNFTRFIAHILEEYRLEQELVITSVLPTEALYVQMDPTQMNRVITNLIQNSIKFADPTKEQLAFTISLTHNQTDLVLTITDNGIGIDKKELPYLFERFYRVDKSRTPTVKGSGLGLSIVKQIIDYHQGTITVTSKKGDGTNVIITLPLLEDEK

SEQ ID NO: 5664 - protein, 231 aa, Enterococcus faecalis
KMKPHVLIIEDDPSIADLQKDYLEINDMTVTIEHDGKKGLEAALNEPFDLIILDVMLPTMDGFEICRAIRKKKQTPIMIVSAKKEDIDKIRGLGLGADDYIIKPFSPNELVARAKAHMNRYQLLSKAEQPPQLLKINEIAVDTAAHKVFVLENEVIFTSKEYKLLVFLMEHPNRVWNKEELFESVWGFDALDTEVSTVVVHIKRIREKLKKANLSDSPIETLWGSGYRFNR

SEQ ID NO: 5665 - protein, 382 aa, Enterococcus faecalis
QMIYFDNSATTPIYPQALDTYVKTSQRIIGNPSSLHDLGSQANRLLQQARKQIAELINVSANEIYFTSGGTEGDNWVLKGTAIEKREFGNHIIISAVEHPAVTETAEQLVELGFELSYAPVDKEGRVKVEELQKLIRKETILVSVMAVNNEVGTIQPIKEISEVLAEFPKIHFHVDAVQAIGKVNYSEWLTDRVDFATFSAHKFHGPRGIGFMYWKQGKRLAPLLTGGGQENNQRSGTENVPAIVAMAKALRLHLENEQQRPQHVATLRSYLLKALEEFQNVTVFSQDNEHFAPHILCFALKGIRGEVLVHALEEKQIYISTTSACSSRKKMASSTLYAMHVPGELATSAVRISLDESNTMAEIEQFMIVFNQLYQKFSRVN

SEQ ID NO: 5666 - protein, 514 aa, Enterococcus faecalis
KERRMQMKFTKELPVWLAPGIKPPESLTSDGWKASQKPPADYFNWFFSRTHGALKELQDSATHIEDFNAHKSNISNPHAVTATQVGLGNVLNQKQATKSEFDAHDQDNIRHITDVERNSWNGKAEKNHTQPWSTITGIPDSTITKKGIVKLTDSVTSTDILTAATPNSVKQVNDNANAAMASASSVNDNLTSHKIDYKNPHKVTSAQVGSYSKTETDNLFINKSDAENGLLVRKSIEITDLNNAKEPGIYSIPATGVENKPLPNSGSLFVSKDPGGVRQLFQTERTIVIRQFGGIPSKWTDWKEVAFKPNVVNLTEPQRIGGTKEFADIPLVNGTEIALKEDIFFYQKTGLDEVQADYKASFREETNMFLTREGNRVDAYLRVNVVDVTKLKTAFVPIFQIPDGFKIDLSMRESFWNVPLTVTQYTYPQGNYGALYEMNVKGIRFGSDRLGNHYLYGSWHTNDPKPDAKFKYMLYVNLYNLSEGRDFVSGSYKGEIYYVAVQIDRHLKGLTPIF

SEQ ID NO: 5667 - protein, 211 aa, Enterococcus faecalis
LLVTKKLRDYLPDLFNRENSNISKLLEIIEFEIKDLTDLLNKVANWRSIDEARGKGLDELGANVGQARGKTTDEIYRVLIRGKVARNTSDGSIDKMLHAIATSLNCHPSDIHIISANETVDEKEPACVIIKKAPLDYLNSSGLSISQFLQIVESISAGGIRVAYVNLEGTFSFSSTTDIEISKEGFADIDGNIGGTLGGVFIPENDYKLPL

SEQ ID NO: 5668 - protein, 77 aa, Enterococcus faecalis
KEIKVIVNNYINNLTMGEVVRFTYIYPLIYQIPGVVVADVKIGLSTETTEVKDINLNPNESAECKTENVVITSDQKA

SEQ ID NO: 5669 - protein, 317 aa, Enterococcus faecalis
YVLDENGFKRKTYDEILYDMSEKAKALFGSDVNVSGHSVLGIIIRIVAWFLSISHELTERVYYSGFISQATGVSLDRLGANSGIYRNPATVAMVELEFSGKPGYIINEGVRFSTENKVMFQMIDIVKIDDNGFGKGRAISLEENASSNVPANTIIVQVEPTEEISSVNNPARAEGGAERETDKAYRDRIGISVRGNPGPPINGILTALLEVSGVRTASVVENKTMETDSYGNPPKSVHVHILGGVKDDIGHAIFKSVAAGIDPVGNQELELKDLGGFSPIVKFDYAKSVPIFVNISIQVDSKFENKRDIERNKSYSK

SEQ ID NO: 5670 - protein, 124 aa, Enterococcus faecalis
RCYYGGDCLMRDLKIVNGDLSFIDYGILLVEGDLELAQSVFMILSIRLEEFKLDTSVGLESDNMFGKNYNEDYLKQDITEAILDQEPRINSIENIEIVRNNRQLNITVEMLSTLGDEVEVVIRA

SEQ ID NO: 5671 - protein, 114 aa, Enterococcus faecalis
GGNLMKETDLAFFRSFKNRILKEINVMQLCRVVTVKGARADVQPMALKSDGGKRALILNALITKHCQSDISQGAVVVVVFCDRDIDNYRSSADYSLSSDRMHSQNDAVIMGVIA

SEQ ID NO: 5672 - protein, 276 aa, Enterococcus faecalis
MGNTQWQRLLQIEIHDKNGKNRVLLRADSGRLDRLEIHFTAPFSDSPNPSEVSVTIYNLNKKSIDFIKKGNPVYIHAGYAGTSNGVITSGTIAEVKPSVLNGVDRATTFTFLEGKDYSEQKEVNITFNNGTDAHTIINRVAREANIPLSEIKLKNNKIYGSGYTADGQAMMVLEEISKACDTSLYFKRGQLVIKNFRDGNKERYRLSPETGLINQPTKVESHDYTGWSVECLLQHKITTGTAVYIDSKNVKGNFYVKNGQHSYDGSRFVTTCEVVT

SEQ ID NO: 5673 - protein, 72 aa, Enterococcus faecalis
MSLRAYIPIDKYSLPEKFEIPLGNTNYIFEVDYNQTEKFFTVDLYDIDHTPIDISERMVIDERLWQDMVDTR

SEQ ID NO: 5674 - protein, 194 aa, Enterococcus faecalis
YSRNRRGCLMGYIQSGKSKVEIVNVSETVTSAANVSQYPVESGAPITDNMMYTGGPVTISGWILAKNGNAAEQAYNTLVAWQKDVRWIVYRGRSYFKNAVIQDISKGYDTVENGFTITITLQPIRVAKTIWEKIPQPPVAKQPSKPSNAVYVTVQPGNTYWGWWQQYGTSIQQLRDWNKWPDRFIPIGARARVK

SEQ ID NO: 5675 - protein, 1729 aa, Enterococcus faecalis
  MISC_FEATURE (71)..(71): Amino acid 71 is Xaa wherein Xaa = any amino acid.
FKRRCHLLMADALRISVIELDWKIHNRSLERANEETDKILAKAARMEGTYHNSAKSIDGATTSLKRNSEGXKPNTDKVVQFGNRAKDSMQKTTNSARQTEKQVKDVGNQFDKSKNSASVFAQSSATSLKVVGKAAKGVQTSIGHIGTVATKASDVAWNAFTKIRNGAMIAGAAIAGAGKKAFDYASDTNEALNKVEVAFGDNNKVVEDWSKSTLTNIGLAQGTALDLAATYGDMSTSMGIGTEEAAKMSTSLVDLAGDLASFKNIGIDRVNTALNGVFTGETEALKGLGIVMTQTNLEQFAMASGALQSSVDNSKAAKNAMAREKAQDRLNKAIKKHGENSIEARDAQLKLTEAESKGEEVQQAKLDSLSQEELVRLRYNYVMSKTKNSQGDFARTSDQAANATRVFTESIKETSAKLGQGLLPIFTPLIIKATDFVKKGEEIPDMLENVGAKVEPTAKQVMKHFGQAKDYFVDEIIPTAKKVGKAIGPGISEGAKNMFNVMDKGFKYIIKPSIRILKEFTDENPVAMKQVGKWATYGIGGLLGFKLVGKPLLGVSKGILGIIGKLEKLGNTAQREAFKTRKALEDVDSAAQKASAPTHTTASPNIQESLPVGSVGKIGKGTKLFSGVRRFAKSVPLLSYISAGLTLTQINKNNKFEKIGDSLGSIVGGALCAKAATLAGAKLGAAAGTTFGPLGTLIGGVLGTAAGSIFGSKFGKKLQEKWPDISKKISELWESSKDNFLLGPLVQGIDKAVKKSKSGIKEIKASAKDLFEKPFDNTTKSGNGVSKATAKRMNSFMKNYELLVNQDTTGKIEGRVLTNEEVTKRYKALEDMQNQVTKQLNKKKDKSNGNLDKLAGMGILNEKDVQGAKAAADELAKVRTNMFSEKVQDFKKLEKQEYDESITATEYYTNRINEIKEKARLENRELSENDKKEIESLEKTSAAAVRAVEEKHAAANKSIHEDMKNQAVVALSDSAKEQKIIMGNLKNASGEISAQQAADAVAASYKAKEGTIKSANEKYEETKRILDEERYVNGTITQQQYDDALKKAQEQRDGVVKEAEKQHEDVVTQAKKQAEGHLEQVDWETGQTLSKWEVFKKDSKKKFKEIWDGTVEGAKSFGKAFGEAMDKVVSGALETWDNFKTALADKVNAVTGGINVVLDFFSIPKIPEWKPNTPNSTKNKHGRSFSTGSRGASYSGQALVGEEGVELAYNKSTSSMRLLGSNGPEVTNVTSGERILNHSDTKAVLNGGMGQGTVLPGFHKGKGNGLSDFVDSAKDFGANTVDKLKDFGSNAVDKAKEVGTKAIEKTKDIAETAKDWLSDPIGKVTGLFNKHNTYKKGKNIQGLGHGVMNKLKDTSAEWVKNKLEAFKGFFDSEDGVSFGSGAFAPHFGSPFVRTSDYGKRPGLYGDFHTGIDYAAPTGTPIPAQYPGLVDWVQSSSIGLGEHVGIKVADNLWAMYGHMSRIRAKMGDKVKAGQIVGDVGSSGWSTGPHVHYELRKGGPNGQHVNPDTYGGAAGGVAVGAAGWGPQVRKAAKQMNQQVSDAEVNGILAQIQRESSGNQSIIQSSAVWDVNTASGNPARGLLQYIPQTFDAYKVRGYENIMNGFHQLMAFFNNSNWRTDLPYGHSGWGPTGHRLRAYAKGGRPSKGETVLVGENGPELFEADTAGTVHPHEKTKALFNQGSPSVNFSPNITINVGNNSDKSVVGDIKEAVRQALEDEYAKLLNILGTGEVV

SEQ ID NO: 5676 - protein, 66 aa, Enterococcus faecalis
EYFKIRSLAHGDISGTFERTLFKQIKTSEVQITISKSIHAYITKEQITDIDTNETKIKYTLNSFTQ

SEQ ID NO: 5677 - protein, 67 aa, Enterococcus faecalis
ILLLNNVFKTLAYYKLRSFIFIRIKQSLTKVLLPDKSEHFLCTNQRFPYKHFLNDKLISFIQVTIDR

SEQ ID NO: 5678 - protein, 86 aa, Enterococcus faecalis
EGDSMKTNYVGVVDKIRMLSMYPKMLVRFSLVTQDETINCIVSKNELANTLLMLPERSELAVYGHLNKRNQLVIEKMLVRKSLISA

SEQ ID NO: 5679 - protein, 61 aa, Enterococcus faecalis
RKMRNTWLAEQLQSISEEPNSFIIEETIKYIEQLEDDNESLQVALEGTIWSPKKWNEPLEK

SEQ ID NO: 5680 - protein, 154 aa, Enterococcus faecalis
IYLEGSLMNIRYISISGNTRSFVQRLTTYSEEQHQHNEKNPTITFKEISENSPLEVETEPFFTFVPTYLDGGDGINNGNTEILTEVMREYLAFENNYRYCSGVVGSGNKNFNHQYCLTAKQYAEQFNFPFLADYELRGTQADIERIYAILKENQ

SEQ ID NO: 5681 - protein, 123 aa, Enterococcus faecalis
SFFLYAKGVKTKEVETMVQEVLEQIKAAEDAVEEHRQQAKMNCRLYEEQKQERLAELRQESEEAVEKVLTDSLATQEKMLQLEKEQLLDETKRTEQALHERYEANKEQVIDSIIERVKDVYGS

SEQ ID NO: 5682 - protein, 662 aa, Enterococcus faecalis
KTFMAVSKMEKMTIIAAAEKEAAILQAIQGLQIVEVKRIFHSPEEEQALKSQYSFLQAEQSTEQLRKYETMLQQLQELLLFLTRSSGKGLKIKRKVYTLEELEQTFDEETLQSYLTELKNIQESLKQIQTDRQGLEAEEELLGRWQYLDVLPHKQQLKSSYVVHGSINLANKASFLSALSQWPTVYFEEIYQSMHHSYFTLVYLKEHQQSVTELLNQYSFEPLQYRYDVPPKEAYQQVKERYEILQKEEKALKQQLASYHDFYETFCLAEEVLLAVIQREQARQHLLNASSFFILQTWIPVEEKAEILTAIEEKVPKDEIALTFENPTKAEIETDIPVKLANNKLVQPFEMLTEMYSLPKYEEVDPTPAMMPFYLVFFGMMVADIGYGLLMLLLSIIALKAFVLPRGMKRFADFFLILSFPTIIWGFIYGSFFGAALPPIMFGIKSPFPILSTTEDVNTILILSVIFGFIQLVVGLMINGIQLSKQKRYLDSINESYAWLGILFGLALLVVGKLVVKNEGLFTAGAILASLSAIAIIVIPMIQSKAKLKGLAKGLYGLYGVTGYVGDLVSYTRLMALGIAGGSIASAFNMLVEFMPPVARFSVGILLLIVLHALNIFLSLLGAYVHGARLQYVEFFGKFYTGGGRAFNPLKTKEKYVNVEKK

SEQ ID NO: 5683 - protein, 166 aa, Enterococcus faecalis
KIIYWRKIEMMDYLINNNGGIVFAVLGMAMATIFAGIGSAKGVGFTGEAAAALTTEQPEKFGQALILQLLPGTQGLYGFVIAFLIYINLGNDMSMVQGLNYFVAALPIAFAGLFSGIAQGRVAAAGIQILAKKPEHATKGIIYAAMVETYAILGFVISFLLVLNVK

SEQ ID NO: 5684 - protein, 197 aa, Enterococcus faecalis
GGRWMDAIEKIISEIKQQGKQEVEAYVTSEQTRIDQEFQAAQQEILLKQEHEIEKRQQQLLKEFKQRQQRQTLEIRQDALNKKQAYLNQLFDEVVLKMSEWSAEEFQQFMKAQLGSLELTGKATILLGEYSQTKVTQEWLTALSDATVQWELSEEVVPKESGFIVAKDGLDYNFLFSALVEEIQKTEGFKVAEKLFS

SEQ ID NO: 5685 - protein, 345 aa, Enterococcus faecalis
QKNFSVKKGGRSMRKPTYHQINPLIRLKETELLSEQQFQQLLEAETVEDVKNMLKSTVYQPYLTETFEEKFDYHSSEALGSLYRWLYEMAPEPAVVTLYTMRFTFHNLKILTKAERTGKDFDYLYLEDGRYSLNTVKSAIHTKNSSELEPALLEVIRDVFAYLEEGGLPQAIDILYDRAFLQQQRKLADELGYEELTKEVIAFIDLTNLSTMARGIVQHQNSNFLSTVLSSAGSITKKELLTYAEKSLVEFTAFVRTTNYGQLLEKIINKETNELNLLAFEKLKDDYLTSMYENGRTVAFGPLPLLAFLNAKEVEWKNLRLILVGKHSGFSNEKIRERMRKVNGV

SEQ ID NO: 5686 - protein, 124 aa, Enterococcus faecalis
FWSENIVGSQMKKFEKGCEKSMGYKIGVIGDKNSILPFKLFGFEVHHAISEMQVREAIETMAKNKFGVIFITEEASTLAEETIERYKEQVTPAIILIPSHNGTIGIGLSEIEKNVEKAIGQNIL

SEQ ID NO: 5687 - protein, 608 aa, Enterococcus faecalis
KSNWTKYFIMQRRMSVQIGKIVKVSGPLILAENMSDASIQDICHVGDLGVIGEIIEMRGDVASIQVYEETTGIGPGEPVISTGEPLSVELAPGLIAEMFDGIQRPLDTFQEVTHSNFLGRGVKIDALDREKKWTFEPTVAVGEEVSAGDIVGVVQETPIIQHKIMVPFGVSGTIAEIKAGDFAIDETVYSVETAKGTESFSMMQKWPVRRGRPILEKLSPKVPMVTGQRVIDTFFPITKGGAAAVPGPFGAGKTVVQHQIAKWADVDLVVYVGCGERGNEMTDVLNEFPELIDPTTGESLMNRTILIANTSNMPVAAREASIYTGITIAEYFRDMGYSVAIMADSTSRWAEALREMSGRLEEMPGDEGYPAYLGSRLAEYYERAGQVIALGKDHREGSITAISAVSPSGGDISEPVTQNTLRVVKVFWGLDSQLAQKRHFPSINWLQSYSLYSTEVGQYLDLELQGNWAAMVAEGMRILQEESQLEEIVRLVGIDSLSDKDRLTLETAKSLREDYLQQNAFDDVDTFTSRTKQAKMLQLILTFGEEGQKALSLGTYFSELMAGTVEIRDRIARSKYLPEEELEKLDRLQAEIKTTIKEIIAEGGMTND

SEQ ID NO: 5688 - protein, 300 aa, Enterococcus faecalis
  MISC_FEATURE (291)..(291): Amino acid 291 is Xaa wherein Xaa = any amino acid.
RMIKEYRTINEVVGPLMIVEKVAGVKYEELIEVRMQNGEIRQGQVLEINGDKAMVQIFEGTSNINIRDSKVRFLGHPLELGVSPDMMGRVFDGLGRLKDNGPELLPEKKLDINGEVINPVARDYPDEFIQTGISAIDHLNTLVRGQKLPVFSASGLPHKELAAQIARQANVLNSEEEFAVVFAAIGITFEEAEYFMEDFRQTGAIDRSVLFMNLANDPAIERIATPRMALTAAEYLAYEKGMHVLVIMTDMTNYCEALREISAARREVPRTSWLPRLSLHELSIVGRTGSXIRTWLHHRI

SEQ ID NO: 5689 - protein, 171 aa, Enterococcus faecalis
FVFSAGMVGVIVGALIVTASAALHSSYKERKEVRYRELEHLVKEIESLNLLNKKVKEILQKRELYIDRSIEYLSMDDCFISIDDFIYLESFSAQNNFYLPTYLIEEFFKKIAHRKVILTASEVAEMGGHTYKGGRVILENFSDEILAIIEDKKRKMQRLSNEPLHYFKAIK

SEQ ID NO: 5690 - protein, 144 aa, Enterococcus faecalis
RKGFLVGVNTMNEWPHQLMTLLTPLFELCILGLNVFSIIVLVWGVCLAGKDFIKSERQNQSRFTLTKMNTFIKNFLGSYILLSLEILIAADIIESIVKPTFQDILKLATLVVIRTVISYFLHKEIEDTMTDMEQQEKEPETPKN

SEQ ID NO: 5691 - protein, 970 aa, Enterococcus faecalis
RKKIGRIKMFKKATKLLSTMVIVAGTVVGNFSPTLALAEEAVKAGDTEGMTNTVKVKDDSLADCKRILEGQATFPVQAGETEPVDLVVVEDASGSFSDNFPHVRQAIDEVVQGLSDQDRVMLASYRGGKQFMFPDGKTKINSADYDMNVRVNTQLTYDKSQFVSGFGDVRTYGGTPTAPGLKLALDTYNQTHGDLTNRKTYFLLVTDGVANTRLDGYLHKTNTNDSINEYPDPRHPLQVSVEYSNDYQGAAAEVLALNQEITNQGYEMINAYWESVESLSSVNSYFDKYKTEVGPFVKQELQQGSSTPEDFITSQSIDDFTTQLKQIVKDRLAQSTPATASLTIANQFDIQSATATDDAGNDVPVQINGQTISATSTEGYVGNITIHYEVKENTAIDAATLVSSGTMNQGTIAKEFPEATIPKNDNAHACDVTPEDPTITKDIENQEHLDLTNREDSFDWHVKTAFGNETSTWTQASMVDDINKVLDIIDVKVTDENGKDVTANGTVTQENNKVTFEMNKQADSYDYLSGHTYTMTITTKIKTDATDEELAPYIEQGGIPNQADLNFGNEGDVLHSNKPTVTPPPVDPNIAKDVEGQEHLDLTNRDQEFKWNVKTAFGNETSTWTQASMVDDINKVLDITDVKVTDENGKDVTANGKVTQENNKVTFEMNKQADSYDYLSGHTYTMTITTKIKASATDEELAPYIEQGGIPNQADLNFGNEGDVLHSNKPTVTPLAPTPEDPTITKDIEGQEHLDLTNRDQEFKWNVKTAFGNETSTWTQASMVDDINKVLDITDVKVTDENGKDVTDNGIVTQENNKVTFTMNKKDDSYSYLAGHTYTMTITTKIKTDATDEELAPYIEQGGIPNQADLNFGNEGDVLHSNKPTVTPPAPTPEDPKKPEPKQPLKPKKPLTPTNHQAPTNPVNFGKSASKGIHLPMTNTTVNPLYMIAGLIVLIVAISFGITENKKRKN

SEQ ID NO: 5692 - protein, 132 aa, Enterococcus faecalis
KGRKNMNKQISFSLLILLLSLLVGFTFIPHKKELSFNEYQEKKHSGETFYVVLKKKNCSDCQDFEKLLQAPKQVYYVELTNKETMKEWSTFIRENKVLHVPYMFKIDNGHLKKIDGEGDANQLFANYQKITK

SEQ ID NO: 5693 - protein, 180 aa, Enterococcus faecalis
ICFHLFWEEERMIELILLLSVILLGLLIGNKRVDKWLFLKALLLFSVMLSVSILISVAMYLLLTMGVANVIGQRLESLFLLGIVVIISTSLLLYFLLNLTTKKIVLPIALMKIIEYYIQWVLIYVTIYQVIFDQFIVSSEVKNTLQGTIDEPVEIIIVILPSFISIWIAVVLFRLRMEEL

SEQ ID NO: 5694 - protein, 600 aa, Enterococcus faecalis
NGGVCMSAWQTFKNGTRQFFKDILQYLWLFFTLNVLLLLVGGAFSWATSNALKTQGIPYLSFNNLNLLLEKPLALVLLILLLLLFLGAVFYQFTFLLLGIFQIRQDHRFHFKGVTKASFKVLKKQGARSWLFFFGYFVVIVPFGNLIFQSNLLTKFVIPDFIVEFLSQRIPYLVGLLAFGLLIWYLAIRFIYTLPLMILERKKAGEAVKASWSMTNKRLWFIIRNIAFVTIAVFVSTYVIYVLLYLLQLKLDTLSDTISLLGGILNLTVVQFLQFVSNAWLSVLLINFLYTQLNVQAETTTKVAFDKETKRNKLVTIGMGLGLFTIFGGYIIFNAVYLTGLLESKPLIISHRGVTNSNGVQNTIPAMERTIKFKPDYIEIDVQETKDHQFVVMHDANLQELAGVDGTPQEFTLAELTKMTVKENGQEAPIASFDDYLAKANQAKQKLLVEIKTSKQDSQGALSNFIEKYERPLIKNNHQVQSLDYNVIKAFKKAKSKVKVSFILPYNFTFPETQADLYTMEATTLNDTFILKADQQKKAVYAWTVNDSEVLSKMLFMDVAGVITDDLELVNEEVNDFEKNPSYADRILHYIFMLPSVASQ

SEQ ID NO: 5695 - protein, 141 aa, Enterococcus faecalis
RRGLNEMKKEFSRVLLKNQSDEILILKDRPDTWNFPGGKQELGESALECAIREMKEELAVEITELEEIFTGPLVFDSIVWQGHFYFAKQAQGKVTLNEPNKIKGVQFIKRFEEVNFSPGLAPLFDYLARSDYLKLNKTNWK

SEQ ID NO: 5696 - protein, 70 aa, Enterococcus faecalis
EEIYMNNGTVKWFNADKGFGFITGEDGNDVFAHFSAIQSDGFKTLDEGQAVTFDTEEGPRGLQATNIVKA

SEQ ID NO: 5697 - protein, 456 aa, Enterococcus faecalis
LILTKITRGRTKIMKFEQRMSQQQKQVQKLAMTQQLQQSIQILQFNTEELAAFVEAKALENPLIDLQVDTQYTTDFPITSRSYTNQDEENNYMNQIPDYHLSLFESLIDQIHLNYRDTYLRTLVLFLVEYIDVNGYLTISLEEAAVKTEASAIQMLDALTLLQQLDPAGVGARNLQECLMLQTERDDTAPNLAYILLEEEFDALVSRKWGPLAKKFGIELAEIQLIFDYIQTLSPAPGNIFDATEELYIRPDLTVRIKEDRIVVISNKAGRPTLNFQENYFKRMQETDDKEVQEYIKDKKNEFEWLERAVNQRGDTILRVGQEIVRRQEAFFLEADRPLKPMTLKEIADALSIHESTVSRAVNGKYLETTFGVFELRSFFSTSILSSEEDGEDVSTTMVKKQLQKLIDQEVKSKPLSDQKLVERLKDSGMEISRRTVAKYREALGIPSSSKRKRYE

SEQ ID NO: 5698 - protein, 108 aa, Enterococcus faecalis
KCEREIIIVGMQIGVLKWLQFTKQKGVHFPMQFLEPKNKNAKSVDWEISEQVRVIVKQYAEYAERTESEAVDEFLLNILDDKKFIEWIANKRSNKRIVEKMGIKDRVG

SEQ ID NO: 5699 - protein, 651 aa, Enterococcus faecalis
TMTKLKRLATKEDEIVDVKIPISNEELKDRAKQYDLLTPKRFATRYNKMLFLPTSFKWNGSEYPIQYNYCINPFCCNFGKEQHKFKDVKGKPSRYKMTGSSKDKGHKGMYCNDNPIGRGVSQNCTVTPLSNWSVVEEIKRLIEINSIQDVEPDYQFHKEGCSEEESTPFNEPKQFYKRGKSRGKSQRYQCKACKKFTNVLPKREETTTYHQQKNTILPMFAKMVVGRVSVSRTCDILGIGVGTYYHKLEWLYRRCLEFLERYETQPLQTKKFNEMWLNTDKMHYYLNNVRKKGQGSKKYTGFEDLNMQTYIVVSAEVLSRYVFRSDVAYDWNISMDELNEDTRKFKEDHLNTFSRKNDRLDWSYYPQEPSANDSENRNAYLHELGKITNRSRFVDGLNVDAPYTTTAHYWLIKQMVNADEWRMISDDDFSIRNAFYRVFTKELRLSDAHHFICQVNKTKSRKQCLKEFGQAKAELLDWGDIRGFKTKFLRTLASHYLTELLTSHQFHEEAISKDGERYRKYADNPIKHPLATKDKGFYSVDCRTDLSALEPNEIAKMLLNVNDHSTNSFIQQIRRYISSLERPLTTARGDKKSYIYANFNPKYAQFAITILRTYYNFCRPFKSADKKVLTPAQRLGITDKQFDWKDIIYFK

SEQ ID NO: 5700 - protein, 165 aa, Enterococcus faecalis
MKVSLIAAMDKNRVIGKENDIPWRIPKDWEYVKNTTKGHPIILGRKNLESIGRALPDRRNIILTRDKGFTFNGCEIVHSIEDVFELCKNEEEIFIFGGEQIYNLFFPYVEKMYITKIHHEFEGDTFFPEVNYEEWNEVFAQKGIKNDKNPYNYYFHVYERKNLLS

SEQ ID NO: 5701 - protein, 342 aa, Enterococcus faecalis
LYQGREPIVIFVPNENNDPRVNLAIETYLLTEMPLDEPILLFYINEPSIIIGRNQNTIEEINKEYVDEHGIHVVRRLSGGGAVYHDHGNLNFSFIMPDDGNSFRDFAKVTQPIIQALHDLGVEGAELKGRNDLVINDMKFSGNAMYATNGRMFAHGTLMFDSDIDEVVNTLKVRKDKIESKGIKSVRSRVTNIKPFLSEDKQEMTTEEFRQEILLKIFGVDSIDQVKTYELTDQDWAAINKISEQYYRNWDWNYGKSPAFNLERRHRFPIGSIEMKMNVADGAIQEIKIFGDFFGLGEIKDVEDILTGVKYDKASLEEAIDQIDVKKYFGNIEKEDLLGLIY

SEQ ID NO: 5702 - protein, 290 aa, Enterococcus faecalis
ILRYLDKGFRFFLWSFCENLSVLTSFFRYFMVTWKYRIEGGCPHMKLTVLGCLGAYPYKGEGTSSYLLESEGFHLLIDAGSTTLVRLENYLDPLKLDAVILSHYHHDHIADLGVLQYYRQLYPTLEPTPILPIYGHTQDQMHFKELTLPNVSEGKEYFEAEELAVGPFLITFMETIHPVTCYAMRIVEKATGKVFVFTGDSGYLASFEDFAKDADLFLADTYLFEGNERHHAHFTSREAGEIAKAAQVKQLMLTHLPQHGSLEQLREEAQNYAGTEIPVTLAQPDLTVEI

SEQ ID NO: 5703 - protein, 263 aa, Enterococcus faecalis
MKSLVTNSQHRANARRALDGQWGIMAWLTFLGVVLQSFLTSIVQNLFSGENQVFQSSFAAVLLQIFVLFALSYALYYAALKVLRGEKVRVNILMSVFQGKYYGPLFVVNLLQKVLERVIGLLFLLPILFGAGTTLYFKLMFNTVTPEEIQAFFLNDFSFFLAFGVATILIFLIGLFVSGVFQFAVWLRFDNPELPIMMALKQALYLMKNRFWQYLCLQFSFIGWYIVGFLAIGIGLLWVIPYNYVALASFYQTALEEKGLAEE

SEQ ID NO: 5704 - protein, 69 aa, Enterococcus faecalis
KTPLTNKPIKKIKIVATPNARKKEKSFKKKAWISSGVTVLNINLKYKVVPAPNKIGNKNNKPITRSSTF

SEQ ID NO: 5705 - protein, 369 aa, Enterococcus faecalis
NWFLRGVIFMDAKEEKMLIDLTSAKGIAGNEDEVRSLFKKYAAPYADKFLYDGLGSIIAKNVGDKEGPKVYISGHMDEVGFMVTQITEKGFLKFQTVGGWWGQVMLAQQVQIKTTTGKVYHGVIGSKPPHVLTAEVRNKPYEIADMFIDIGASNDQQVAEWGIHPGDMVTPYIDYRRMNDTKFLLAKAWDNRIGTAVSLKVLENLATEGHPNILFAGSDVQEEVGLRGAQTSTHLVNPDIAFALDTGTAGDTPGMTPKEADSVLGEGPQILIYDASMIPHKKLRDFVIQVAEENNIPFQYTVITGGGTDAGRMHLTRNGIPSLAITVPVRYLHSHTSVIHEDDYFNTVKLVTEVVKRLDKETVAKLTSY

SEQ ID NO: 5706 - protein, 254 aa, Enterococcus faecalis
KKNKMRGEKMKRFWAFTAVFLTVLLIGYLEPVFFPAEKPTETAQSGRLSSAHTAVPHEELPASGYAAYIGKDVEIFIRQFGNPKEKIKTGRTYELWTFGLTMNDYLEVNVRENKVIAIKAFNNDKMIEPFKIDMKLADLSDLMTIYSNFAFNFHHEAYDVELMEEDMNYRPLVAFDNGSFAVLFFNQRTGGLMAVNYVNKETLLTEMPYQLNEGSPLPVDITQSMTFDPVQSNQAIYVMNLVKQQESQVAFSSF

SEQ ID NO: 5707 - protein, 1163 aa, Enterococcus faecalis
VLFIFRTEPINLKEIDGRSDVMKKVLVANRGEIAIRIFRACTELDIRTVAIYAAEDEYSVHRFKADEAYLVGKGKKPIEAYLDIENIIQIAKKSGADAIHPGYGFLSENLRFAERCEEEGIIFVGPKTHHLDIFGDKIKAKEAAVAAGIASIPGSDGPVATVEEVVAFGETHGFPIMIKAALGGGGRGMRVAHDAKEAREGYERAKSEAKAAFGSDEVYVEKYISNPKHIEVQILGDHHGNVLHLFERDCSVQRRHQKVVEVAPCVSMNEEQRAAICSAAVQLMAHVGYVNAGTVEFLVEGDQFYFIEVNPRVQVEHTITEMITDIDIVISQLQIAQGLDLHKDMHLPKQNELTLKGAAIQCRITTEDPLNQFMPDTGKIDTYRSPGGFGVRLDVGNAYSGYAVTPYFDSLLVKVCTHGFSFEQAISKMQRCLKEFRIRGVKTNIPFLQNVVSYPAFQSGEAKTTFIDNTPELFEFPRMRDRGNKTMKYIGEVTVNGFPGIERTEKKYFEAPRVPTDIEVPEKVITAKNILDAQGATAVIDWVKNQESVLMTDTTFRDAHQSLLATRVRTQDFKAIAGLTDAALPELFSSEMWGGATFDVAYRFLTEDPWQRLRKIRQLMPNTLLQMLFRGSNAVGYQNYPDNVIEEFIKESARQGVDVFRIFDSLNWIPQMEKSIQVVRDTGKIAEAAICYTGDINDPARAKYNVQYYLDMAKELENLGAQIIAIKDMAGLLKPQAAYRLISELKAATDLPIHLHTHDTSGNGIITYSAATKAGVDIVDVAMSAMSGATSQPSMNSLYYALVNGERTPTINIDNAQKINHYWEDVRMYYQPFENGLNAPQTEVYMHEMPGGQYSNLQQQAKAVGLGHRWDEIKKIYHTVNLMFGDIVKVTPSSKVVGDMALFMVQNNLTEQDVYARGEELSFPESVVTFFQGDLGQPVGGFPKELQRIILKGRPAFTERPGDLAAPVDFAKVQEELAEKIGYQPKLEEVLSYLMYPQVFLEYRQKYETFGDITLLDTPTFFNGIRQGETLEVQIERGKTLIIRLDEIGEPDIDGNRVLFFNLNGQRREVLVKDASIKSAVQVKQKAEPTNKEQIGATMSGSVLQVLVKRGDKVEKGQPLLITEAMKMETTIEARFAGTVDHIYVEEGEAISSGDLLLEVKEK

SEQ ID NO: 5708 - protein, 403 aa, Enterococcus faecalis
ALPNKVKKRHLLDYSIFIPYLILSIVGLIMVYSSTSALQVMKGFSPTSFVINQVAFWVVGLVAMFFIYKMKTSVFQNRSFIMFAIAVITVMVLAVRIPGIGKEINGARGWIEIGGFSMQPAEYLKIMVVWYLSYILARRQKTINGGMDQFKQAAGRPLMLVFVLIALVAIQPDFGNAAILTLITIVMVLASGINYMYTYLVGGLGILGSITAIQLLIMSKGKIFPARYQYIYNRFAVFKNPFLDERNLGHQLANSYYAISNGGWFGKGIGNSVQKKGFLPEAHTDFIFAITLEELGIIGGLAILGLLMFMIARIILVGVRSKKPFNSLMCIGIGTMLLIQVFINVGGITGIIPLTGITFPFLSQGGNSLLIISIAVAFVLNISADETRQKLENEYYLSLEQNQ

SEQ ID NO: 5709 - protein, 106 aa, Enterococcus faecalis
GGSVQMDEGISKKFAIQLLEDDAERIKMLIRNQKNSLCISQCKAFEEVVDTQMYGFSRQVTYATRLGILTNDEGHRLLSDLERELNQLYTDVYEETQEKNEIGKEG

SEQ ID NO: 5710 - protein, 589 aa, Enterococcus faecalis
MSALQELLKDTFGYDDFRPGQETIIRHVLRQENVLGIMPTGGGKSICYQLPALLLDNLTLVISPLISLMKDQVDALNLMGIPATYINSTISYQEMNHRIQLAVNKEVKLLYVAPERLESYDFQQMLTHVPIDLLAVDEAHCISQWGHDFRPSYLRLAEIIDQFQQQPTVIALTATATPQVAEDIVKQLRIPSENEIKTGFARENLSFQVVKDQNRDVFLLEYLKMNTGQSGIIYASTRKEVERIYHLLESKKIAAGMYHGGMSEQLRSENQEAFLYDQVQVMVATNAFGMGINKSNVRFVIHAQVPGNIESYYQEAGRAGRDGLPSDAVLMFAPQDLQIQQYFIEQSEMTIDYKQKEYLKLREMSQYANAQMCLQKYILRYFGEEGTDCGRCSNCLDNRELVDITVDAQKVLSCVKRMGERFGKGLVGKVLTGSKDQKIDQWHFDRLPTYGLMKGRTQKEVTQLIDYLTAERYLIPSDGQFPLLSVSTEGVQVLLGERKVFRKEDQKVRKVAVDDALFERLRELRMDMAQEAGVPPYVVFSDSTLKEMCEKLPQTTIQLLQIKGVGQNKLDKYGTAFLEVIKEYQETKK

SEQ ID NO: 5711 - protein, 271 aa, Enterococcus faecalis
GGGSIPWARLVDPIGPDAWTVSGRGELHLSILIENMRREGYELQVSRPEVIEREIDGVKCEPFERVQIDTPEEYMGSVIESLSLRKGEMQDMINAGNGQMRLIFLAPARGLIGYSTEFLSMTRGYGIMNHTFDQYLPMIQGTIGGRHQGALVSIDTGKATTYSIMSIEERGTVFVEPTTEVYEGMIVGENNRDNDLTVNITKAKQMTNVRSATKDQTSVIKKPKKLTLEESLEFLNEDEYCEVTPESIRLRKQILNKNEREKASKKKKKAE

SEQ ID NO: 5712 - protein, 399 aa, Enterococcus faecalis
RKEQLMDKESTKWIRFLGGKNLLYTLTILCLIAVTIFLFNTVSFIFKPIFVIFSAVLGPVLFGIILFYLLNPMVKRLEKKIPRVWAIAILYVLIIALLVLAGLQLFPIIQDQTEELIKQFPSFWKSTLQTVQEFMAKTPFAKDLESANESINQLWGKLANSFKDFAGDYLQTGAQGLGSVFSAVSSTFLTLFTGPIIAFFLLKDKEKFYRFVKGIIPPAFRPDFDEYSQIANIQIGDYLKGQVIASLVLGIMYWPAFLLIGLQFGSILALAAGILCIIPYIGPFIAFIPGLIIAFQDSTFMVVKFVIVWFAIQLIHGDFVIPRVMGDKLKVHPITILLVLLVMGELFGLMGVIFGIPMYCLVKVTVIYLFRKFKQRYNRFYGDNGEYEHTNFTKDQYLK

SEQ ID NO: 5713 - protein, 380 aa, Enterococcus faecalis
ERVRQMSSQIPFTVDHVGSFLRPETIKKARKKVQAGALSQAELRLIEDEEIKALVAKQKAGGLRGITDGEFRRGFWHIDFLEGLNGVTGYIPETGYNQTFHGKAAPAYNIRVVDKISFPTQHPFLEDFSFLKEVVEVGDGTVAKATIPSPTMILRQEILSNDGTSRIQTIYPEIGAFYKDLAQTYKDAIAAFYERGCRYLQFDDTNWAFLADQTKQEELRAKGIQPEEIAQVCTTIINEALAGKPEDLTVTTHICRGNHASSWLFSGGYEPIAKELFATNYDGFFLEYDSDRAGDFSPLRHWQNNGSKVVLGLVTSKFPELEETEQVKARIEEAQQFVPLENLSISPQCGFASTEEGNRLTEKEQWRKVQLLQEIAREVW

SEQ ID NO: 5714 - protein, 450 aa, Enterococcus faecalis
QVKKRLFASVLLCSLTLSAIATPSIALADNVDKKIEEKNQEISSLKAKQGDLASQVSSLEAEVSSVFDESMALREQKQTLKAKSEQLQQEITNLNQRIEKRNEAIKNQARDVQVNGQSTTMLDAVLDADSVADAISRVQAVSTIVSANNDLMQQQKEDKQAVVDKKAENEKKVKQLEATEAELETKRQDLLSKQSELNVMKASLALEQSSAESSKAGLEKQKAAAEAEQARLAAEQKAAAEKAKQAAAKPAKAEVKAEAPVASSSTTEAQAPASSSSATESSTQQTTETTTPSTDNSATENTGSSSSEQPVQPTTPSDNGNNGGQTGGGTVTPTPEPTPAPSADPTINALNVLRQSLGLRPVVWDAGLAASATARAAQVEAGGIPNDHWSRGDEVIAIMWAPGNSVIMAWYNETNMVTASGSGHRDWEINPGITRVGFGYSGSTIVGHSA

SEQ ID NO: 5715 - protein, 101 aa, Enterococcus faecalis
FFSSIFLSTLSAKAMLGVAIADSVNEHSNTDANRRFFTCHSSELISKVYLKYINLFLRQKHSTTPIFQLSNRNVTKTFQITPSFSIIGKLTFCKAFTPCYD

SEQ ID NO: 5716 - protein, 71 aa, Enterococcus faecalis
VNLPFVRLLHLVTTSFHVFSIVKQFFDFFSYFFFFYSNFASFLSIYAFFRKINHFSFFLLNVFVTKFVIFW

SEQ ID NO: 5717 - protein, 776 aa, Enterococcus faecalis
ELLDCSLERRDNMKRSKWKELIVTGICHILVFPILIQTTVFAETLPSTKQVREGTNHSLTAEKAESEQPQTKDKLHDEETLALSKSELIDNEANVTSQTIRERIETPNLTYRYGFINEEGQPVNANEILLQYHSWQGNSPDGINVWEGESQPVTASTVANLKEVVIPSEKVAVYSDMSTVLAASNQTFFLPRYYTSLSLYNKKGEIDPNYPLPTISDASGNQYPTTISQFELEKMSAQQYSQKTGVTFNISESQKLIVPLYNQVKVDSSNQSGLLNYFKFSGPVYYHVTNRKVTEHFVDTQGKPIPPPPGFRQGKQTLIERDPYTFKQKDLLPSSYEIDSKTYQFQGWYKGKTKPENLEKSVTPSYDITYDDNDDLTVVYKEIPQKNYTFEDVNGVEIAPPSDFIQDHQQPITTDGFRYLAGKKLPQQYSVNGKTYLYQGWYQDKTKQESLEKTKRPINSPVFNEMNAITAVYKEITAKAEMQIEGLVKVMPSGYIQIWQIMLTNVGEVPLKKINLKPASGWSPGLARPIQVTIRVGSEPNKIVPITDENWRVGITLNTEVPIGQTATIMMTTIATGEPDQVLQAAVEMNGNFSAVHAADTVRIQPKNQEIVAPDEEGFISTPTFDFGKVAISSNTQQHGLKQAADYYENGQENPYLRLKKSQPNWALTAELSPFEGRVDQLSSMTKLLLGTTNVSGFIQYNQPTETKVALGKTTAIQLVANGVASHIVANGQFDESDVYQFDFSFDQIKLEIPANQGRKDQTYQAMVTWNLVTGP

SEQ ID NO: 5718 - protein, 411 aa, Enterococcus faecalis
GVENMDLLIKQVRLQDGEALQDVAIKEGKIIEIAPVITGDAKEVIEADGRVLIPGFVESHLHLDKALIADRKPNKSGTLKEAIEVTAELKPTFTEEDIYDRAKRALEMLIVHGTTALRTHAEFDPAQGFTGFKTIMRLKEEYKELIDMQVVAFPQEGIFKAPGTEQMMYEVMDMGADVVGGIPYNDAPAKEHIDLVFEIAKKYDKDVDLHQDFADEADDMSIEYLCEKTIAEGYQGRVSVGHLTALHALPEAELAPIIAKMAEANISVMALPATDLHLGARGDQYNVRRAVTPIRKLRDGGVNVCIATNNIRNAFTPYGTGDIVQTAMLAIPVGHLGGADDLKTVLPMVTTSPARAMGLEGYGVAVGNKADLVLLDTKVVEHAIIDIPERLYVIKNGRVTVKTDKKVEIIR

SEQ ID NO: 5719 - protein, 72 aa, Enterococcus faecalis
CYQLLYRLNYPPLALCFVPMGVGLGIQMTFVNITMQAISSGFQIPILDVVKGNVKWLSIASVLLLVIGLIFG

SEQ ID NO: 5720 - protein, 442 aa, Enterococcus faecalis
IWRARCLCQIMRSAESIRYCVALAFFLLEESKMKKSSKVALIFAFLVSIFVPVAAFADEIGDVVAPTGIMALVVIIPLIVVLVLLFMKVDMIIAGLIGGVLAMLIGGIGLEEANKQMLEAIPMMLGITVPIINSAVAMAVFKAGSYSAALTLAKRGTKGKVEYVSAFIVILLAAATYMSGIGGGSAMVIAPLAFAAVGVVPELIAAMSLAAAVSFTTSPASLESSIVSKLGDISVGSYVSTMRPYWLFFVALAIVLAFWGTKHRNVGFKESADDEFDKKSNGELFKITLPAIFLLFAVIFGPIVNDLIGFAFFTPLVYMISTLVSIFLCTDFSMNKSVQAMVDGSTYILTRLFQVGIFLAFINVIAQTGTFAVIAGVAENAPTFIVMPVAILTGILIGIPAGAYVGSVLTLVLPVAVSIELPAVSIMFRTNGCWFRYSNDFR

SEQ ID NO: 5721 - protein, 263 aa, Enterococcus faecalis
QFVCNEQLVAAVDLAKESGVAYVGVSQTSHSGSFSYYVKKAAEQGMLLLSMCQSDPMVVPFGGTSNYFGTNPIAFAAPRAGHEPVVFDMATTVQAWGKILDARSRDVEIPDTWAVDEKGQPTTDPYEVRGLLPISGPKGYGLMMMVDVLAGSLLGLPFGKHVSSMYADLTEKRNLGQMFLVIDPSRFTDSERFKENINQMVEELHCVPTAEGFQQVYYPGEIGQLNYQKAMSEGIEIPQSIYDYLVSEIVHYDKYGGQGAFAK

SEQ ID NO: 5722 - protein, 246 aa, Enterococcus faecalis
LDYTKINRKERVKMQIIRVANAEEGGKKAFELIKEGMNNGAKVLGLATGSTPETLYKEMTASDVDFTEMTSVNLDEYVGLGGEDEQSYRYFMNKHLFDKKPFKETFVPNGKAEDLDAASAEYEKIIDAHPVDIQILGIGQNGHIGFNEPGTPLDSLTHVVELTESTINANKRYFDKVEDVPTRAVSMGIGSIMKGKKMILMAYGEAKAEAIKGMIDGPVTTDMPASALQNHQDVVVIIDDAAASKL

SEQ ID NO: 5723 - protein, 267 aa, Enterococcus faecalis
IIIVDEKELETGEFPYVSSSFFVILEVIEEEVKRMLQLTIPEIILRLVLAMVMGGAIGFERQYKNRPAGMRTHILVCMGAAIIALIQSQIAINALKDALANPALTGVIRSDQARLIAQVVSGIGFLGAGTIIVTKQSVTGLTTAASLWTVAGLGIAVGMGYYTIALTSFIGVLFALTIVKRIIHVPTIKKLEIRYQHKQETKEFINQYFEEKHIEIYDVNFNVSWVDDTKIYTNIYTIDLPKGLTYADVIEDLSVSNNVTKLRLINV

SEQ ID NO: 5724 - protein, 201 aa, Enterococcus faecalis
LYYELERKVISKMNKKNKFLSIIVVVIVIIGAFVMKAYNQLITLDNKVEAEWSQVENVMQRRADLIPNLVSSVQGSMTQEKEVLKEITEARKAYAGAKSSSEKGQANEQIEKGLGNFVTVLNEDYPKLASSENVKTLMTQLEGSENRISVERRNYIQAVETYNQQISKFPDKIIAKLLGFEKKTNYVATEQGKEVPQVKFK

SEQ ID NO: 5725 - protein, 430 aa, Enterococcus faecalis
GRLDKKVEKIQEKVRLFYKKHQRNTTIVVVISLSMILILGMAAWYEGKGISYEAKQTALREKQHALQKKRDDILAGKMTEASTQTTINNFSKQEITGENELVTITGTNGQLNINDANIYVSDNAGIVSNQLKQKMFQLNQQLLENANGAQFMLITVPALPSGESVESYSNKIANQLGVGDREKNNGVVFLMAIEDRESRLEVGYGLESILTDSYADDIINNEEVKEAFRDEDYNTGLNKIIDQVSAAINSKTAQVDNELTNIQTELNTNTTKRNVLLMASIAGMLICAVYILQILRTRKLVKKMYQDYLNCLPTKAVLNNSEQTKKVLNKMKKTSFYCLYLNGATLFATKGKIRRATKRGSLLSIYPNAKKQSFGRLLVGDTLYSYDGSVLTYAYLNSQYNPSNHSSSGSGSGGSFGGGSFGGGGASGSW

SEQ ID NO: 5726 - protein, 334 aa, Enterococcus faecalis
SNRLLSQHTGGITMATYYEAINWNAIEDVIDKSTWEKLTEQFWLDTRIPLSNDLDDWRTLSDLEKTTVGYVFGGLTLLDTVQSESGMDQLRNDVRTPHEEAVLNNIQFMESVHAKSYSSIFSTLNTKKEIDDIFEWTNTNKHLQYKAERINEIYKNGTPLEKKIASVFLETFLFYSGFYTPLYYLGNNKLANVAEIIKLIIRDESVHGTYIGYKFQLGFNELPEDEQDKLKDWMYNLLYELYENEERYTEELYDDLGWTEEVKTFLRYNANKALMNLGMDPLFADTANDVNPIVMNGISTGTSNHDFFSQVGNGYLLGTVEAMKDDDYLYGLDK

SEQ ID NO: 5727 - protein, 722 aa, Enterococcus faecalis
WKKLSLKEIKDVSYFKLNNEINRPVDGQIPLNKDKEALAAFFKENVEPNTRKFSSAEEKINFLMKEDFIETEFIEKYSMDFIEKLYAFLDEQHFQFKSFMAAYKFYSQYALKNNAGTEYLETYEDRVAFNALYFADGDEELALTLADEMIHQRYQPATPSFLNAGRKRRGELVSCFLVQVTDDMNSIGRSINSALQLSRIGGGVGITLSNLREAGAPIKGYDGAASGVVPVMKLFEDSFSYSNQLGQRQGAGVVYLNVFHPDIEMFLSAKKENADEKIRVKTLSLGVIVPDKFYELTRNNEDMYLFSPYSVEREYGVPYSYVDITKEYDNLVANPNIRKRKIKARDLENEISKLQQESGYPYIINIDTANKNNPIDGKIIMSNLCSEILQVQTPSVINGKQEYEVLGTDISCNLGSTNIVNLMESPDFGKSVRAMTRALTFVTDASEIDVVPTIQNGNRLSHTIGLGAMGLHTFFAKNHMEYGSEESLDFTDIYFMLLNYWTLMESNQIAKERNQVFHNFEKSDYASGAYFDKYIEGNFTPKFDKVKEIFKDIQIPTAEDWAALRDAVKKDGLYHQNRLAVAPNGSISYINDTSASIHPITRMIEERQEKKIGKIYYPAPYLANDTIPYYTSAYDMDMRKVIDVYATAQQHVDQGMSLTLFMRSEIPEGLYEWKETPKQTTRDLNILRHYAFNKGIKSIYYIRTFTDDAEEIGSNQCESCVI

SEQ ID NO: 5728 - protein, 131 aa, Enterococcus faecalis
NNWLAKMKLVYFSVTGQTRRFIKKLDLPAYELEPANPFFEINEPFILVIPTYDAEITEVVNDFLDYKSNQELLVGVAGGGNRNFAELFVYTAKDIARDYHVPLLYSFEFSGTDEDVETFKKVVEEIESKRN

SEQ ID NO: 5729 - protein, 88 aa, Enterococcus faecalis
IYTSLCRKKEEELSMNVKIFSKNNCIQCKMAKRFLSENNIAFEEINIDAQPDAIDWLKEQGFQSVPVITSEATTVVGFRPDQLKQLAS

SEQ ID NO: 5730 - protein, 110 aa, Enterococcus faecalis
DIDTRVCSLQTKRFNQEAAKLDGVQIITISNNTVEEQANWCAAEGVEMEMLHDTEDSFGAAYGLYIPEMGRLARAIFVIDPEGTLVYEEIVSEVSSEPDYQQALESAKKV

SEQ ID NO: 5731 - protein, 894 aa, Enterococcus faecalis
LPLQIAYFKKEGEKMSEEKNLPTKYQPTEIEAGRYQKWLDQDLFKPSGDKKAKPYSIVIPPPNVTGKLHLGHAWDTTLQDMIIRQKRMQGFDTLWLPGMDHAGIATQAKVEEKLAQQGISRYDLGREKFVDQVWEWKEEYASHIREQWAKMGLSLDYSRERFTLDEGLSEAVRKVFVSLYEKDLIYRGEYIINWDPKAKTALSDIEVIHKDIEGAFYHMSYPLSDGSGVVEIATTRPETMLGDTAIAVHPEDERYQELIGKTVVLPLVDKEIPIIADDYVDMEFGTGVVKITPAHDPNDFEVGNRHDLPRVNVMNEDGTMNELAGKYEGMDRFAARKAIVSDLKELGRLIKIETMNHSVGHSERTGVVVEPRLSTQWFVKMGPLAEKAMKNQETEDAVEFYPPRFNQTFLRWMENVHDWVISRQLWWGHQIPAWYHKETGEMYVGMEEPADSENWVQDSDVLDTWFSSALWPFSTMGWPNEASEDYQRYFPTSTLVTGYDIIFFWVSRMIFQSLEFTGERPFQNVLIHGLIRDEQGRKMSKSLGNGIDPMDVIEKYGADALRWFLSNGSAPGQDVRFSYEKMDASWNFINKIWNASRFVIMNVEGMTAADIDFSGEKTVADRWILTRLNETVARVTELFDRFEFGEAGRQLYNFIWDDFCDWYIEMSKEILYGDNEAAKQTTRSILVYTLDQILRLLHPIMPFVTEEIWEKIPHQGESLVVAEYPVVHEEFNDEAAARGMEVLKEVIRSVRNIRAEVNTPLSKPITLLIKTNDTEVEEFLTANTSYLERFCNPEELVISREIEAPELAMSAVLTGAELFLPLAGLINIEEEIARLEKELDKWTKEVKRVQGKLSNERFVSNAPDEVVEAERAKEKDYLEKQEAVKERIAQLRSI

SEQ ID NO: 5732 - protein, 231 aa, Enterococcus faecalis
FISALPSAERFYWERLVILGLKNTVENVRRPLMTNQKKFLNGLIRWLPLVGLVLFFGLILWGYSRGIFHSVASLQAFIKQFGNYAVLCFILLQIVQVIIPILPGGISSVAGMLMFGNLQGLLYSYLGLIIGEFIGFLLVRYYGRSFVKIILSPNKYKKFEEILDKNEHNVKKLLIFTMLVPFAPDDIVCLVAGITDISLKEFMKIVLLLKFWSVATYSYLMLYLFQLFGKL

SEQ ID NO: 5733 - protein, 863 aa, Enterococcus faecalis
FFYKGGLILMKNKSKLLWLGSFFLPFLLLLLVWMTLQLAPFGDNNLLVSDLGTQYMPFLSFLKRSFHEGITTFYSFSNEIGESIVPLAAYYLLSPFNVLAFFFPYEQLPIAILWIITLKLALMGTTMFSYLKYTYQKVDGTTLLFSTSYSFCGFVTVYSQNFMWLDALILFPLILLGLQRLWDQRKWGLYSITLFLAIVTNYYMGYMICLFAVLYSIYWFFKKNTKAHAIRQFFKQSPLFILVSFLTGTATSFLLLPAAEGMLYTKKADFDVSTFFLTPKFNTSFFSQLGLGSINYELRLDHLPTVFAGLFVTLLCVAYFQTKQIALKERIASAILLFILFLSFWLEAFNTVWHMFQSPAGFPYRNVFIFSFLLIVFAYEVWLKKVTIPWTAPIIFSLLLVIGYGSLYYGPQKNLLISINYLWLSLLFIWLIFFCLRLAHKKALRNYVVVALFLLVSTELTTNFWISFKHMPFGSQATFAQDYRKHSQLIDEKMASAPELYRMKQVIPSKETGFREINNGYNNPLLYGYAGVSSYTSTLTATTQDTLSALGLYRKNDRRIAYVDNSQLTNLLLNVKYDFLPIEKPTSEKLLKTVGSTKIMENDEAIGMGFLAPTALTKLKLAKNNPLDAQEELLQTLVPTDKPYFKTASLINEPHHTNETIEATFKVNSTGDLHLYIPNLKWKKVTQLKVNQQVISTPIYIATNQLFNLGHFEKGTTVTLSLTAEQVVDLTNWQLQTLDQTAFNRAVDKLRQQALHVNATKKGHLNGALNVPGNDTQLLYTSIPYDQDWQVKSSLQKEPLKTQRILGGFLAVEVPAGKQQLTFAYHPRMIYLGTAVSGTILLGTAGYLGFKKYRRKRQEATHD

SEQ ID NO: 5734 - protein, 71 aa, Enterococcus faecalis
SAVSHWLRIFVLWSTKESLNFDQLFMAKFTFYLVDFLLLAFSAQKGLKKLCSRGFILTGQHRINNEFLDFF

SEQ ID NO: 5735 - protein, 453 aa, Enterococcus faecalis
LSYNVEEDKELDKMQLTIEEAIEWIHSRLPFGSRPGLDRINALLEKIDHPENKVPTIHIAGTNGKGSTVTYLRCLLEEMGLKVGTFTSPYIESFNERIAINGQPISDEQLITYVEKYQPIIKELDQITEVAGITEFETLTGMALDYFVNEQVDIAVVEVGLGGLLDSTNVVKPLLTGITTIGKDHTEILGETIAEIAYQKAGIIKEKVPVVTGNICADALAVIEKVAQEKQSPIFRFGKEYQVEYLHPDTQWGEVFNFYGEMGKLTKIKVPLLGRHQVENAAVAIQLFDKYCQLQHLPFKERDITQGLAKAQWPARMERLSDEPLIVLDGAHNDHAVKRLVENLRKEFPQHTIHILFSALATKDVDEMIQDLKQVPNAHLYLTSFDYPKAIALTEMEKYEDDLTEIVSLWQFGLGEILEKMSTDDLLLVTGSLYFVSQVRELLLTIGGNDEEI

SEQ ID NO: 5736 - protein, 221 aa, Enterococcus faecalis
EEMMKKFDGVIFDMDGLLFDTELIYYTSTQKVADAMGLPYSKEVYLDYVGISDEEVQENYRRIYASYGHDTVEEFIRRSYDDTLQEFRSGNVPLKPGVVEFLDFLDDQKIPRLVASSNVRPAIEMLLSHAGIQDRFVGIVSAEDVKRAKPDPEIFQKARQLLGTEAPKTLIFEDSFHGVSAAHSAGIPVIMVPDLLQPTEVIQEKTLHVLESLHQAPHYLK

SEQ ID NO: 5737 - protein, 64 aa, Enterococcus faecalis
NNKNNTPLRSLLMTSKGGFFMQVSDLFIREMPSDCLPRERLLAIGEKALSNQELLATLALHTRN

SEQ ID NO: 5738 - protein, 150 aa, Enterococcus faecalis
SHMSDKNTYARRSQRHKQEPDICENTNQLNEAVKSKTGNENKQPKIPKKKSNYSKYIFALFTAHILVIVATGGYIVYTLKQQEVEAQTKYETAAKNLMASIQEEQDQSGISTKIDTINDGENKCLVYSPVYESTVPFKNANQLVDELAQK

SEQ ID NO: 5739 - protein, 370 aa, Enterococcus faecalis
QKKQREKEVLTVARIKATAISSKIGQYRIEADSFIWDRSKENFKKLDSISEKTIYVSEKTGKEITNKDLIPDEGSLLGIQQVIQQSILDHAKELEKIIDAVLTIDRISYESKMTYTPDELTIDLPKNTTETTKVTLKYRDIAPFIDTDLVSQESIKDALPALDENKKYVALTFDDGPNNSSTLDLLNILKTNNVKATFFMLGQMVDQNPDVAKQVHDEGHEVACHLYSHPQLNTLSTDELQSEMNKANKANKAIFKATGVLPRNIRPPYGAIDKKSAETIGMPIIQWNIDSLDWKTRNPEAINNVVKQNVFNGAIILIHDIHHESVKAVPGLITMLKNEGYEFVTIDQLLSGKQKPLHQYFGMNDERLVD

SEQ ID NO: 5740 - protein, 78 aa, Enterococcus faecalis
LKFYLEKAKVFETQHAAFGYLALDYGLIQVPIAGLSPEEEPSSGQFAELKEYAKKIISIIFVLKRMLMIQKLWPTKLG

SEQ ID NO: 5741 - protein, 153 aa, Enterococcus faecalis
IKRVCQKNNINYICFEKNANDTKTLANEAGIKLEVLNPLESLIKEQMNNGEDYVSVMEDNLKALEKTTMVAGEEVVPEKEAKDEKTVASGYFKDVDVKDPELSDYTGEWQSVYPLLKDGILDEVFDYKAKLNKDMTAAEYKDYYTTGYEIVFL

SEQ ID NO: 5742 - protein, 162 aa, Enterococcus faecalis
DSFPLVRFNLLFIMHRKRIPMKKTITILTDYLGLGKIDMKIGDVIIIGILIISSFIPLFIFSLEKGNQGTTKYAVVRINGKEVDRFNLDKISHKYVKYYPAKGQYNIIEIKDGKIRDREDNSPDQIAVRTGWISNPGQTSICLPHKLVISIEKKGSPDYYIY

SEQ ID NO: 5743 - protein, 319 aa, Enterococcus faecalis
MTYKHLTIDELTMIESYYLQHNKPVEIANRMGRAIQTIYNVVNKFKQGKTALDYWHQYKENKKKCGRKVIQLPAHEVDYIKEKVTLGWTPDVIIGRKERPVSCGMRTLYRLFSKGIFDIDTLPMKGKRKPNGHQEKRGKQQYQRSIHDRPDNYPDFNSEFGHLGGDTIVGIHHKSAVITLVERLSKVIITIKPNGRKALDIETALNQWFSRFPKNFFKSITFDCGKEFSNWKAISNQHDIDIYFADPGTLSQRPLNENSNGILRHNGLPKSMDFREVNQTFISSVSNQRNHIPRKSLNYRTPIEIFLSYVQEAFYSNLI

SEQ ID NO: 5744 - protein, 139 aa, Enterococcus faecalis
  MISC_FEATURE (17)..(17): Amino acid 17 is Xaa wherein Xaa = any amino acid.
LPPRCGTLGQFLPRFLXKNSKSFREAVKGIFKFTDINLAREAKNRLIHDYIDQPKYSKACASLDDGFEDAFQYTVQGNSHNRLKSTNLIERLNQEVRRREKIIRIFPNQTSANRLIGAVLMDLHDEWIYSSRKYINFDK

SEQ ID NO: 5745 - protein, 227 aa, Enterococcus faecalis
LSPIGIVAMIDVAQGDSLFIQAPFHRKNTLIDTGGRLSFGKEDWRQRKNSRSGAEYSVIPFLKSQGVKRLDEVIITHAHEDHFGDLLAIAQKVPISVLYFPKGAAEANFSFRQVLKQLQKSGTDCRPILAPKRINGPVSFQILSPNKSSIGGNNDSIVFSTQLGGRHFLFTGDLEAEGEEQVLARYPQLKIDILKVGHHGSKTSSTKRFIKQLNPREALISAGLNNR

SEQ ID NO: 5746 - protein, 139 aa, Enterococcus faecalis
  MISC_FEATURE (117)..(117): Amino acid 117 is Xaa wherein Xaa = any amino acid.
INRGVCDMKKIITIIVSLAIGIGCGFWSGYYISKKYSENQETTISKSTNSEQPLITNGEYQVTANWDWKTLVVKDNVWTLDGKRIYDVSTTNDNIVILKGKNLKSLVVYKIEKDNEXINLYSYTKESVGKKVLATLVKK

SEQ ID NO: 5747 - protein, 827 aa, Enterococcus faecalis
LSNRESRSGKMKKAAIMGWWYNQNYGSILTYYALNKYVQNKGYETVMIDGPLGYKNRSNFRAWMPLAYNFFKKNNMPYTEQLTKETLPTLNDLENLDTFILGSDQMWNPWNGWVDDDDFLDFVYPRNKTIAYSVSLGKADTSKYDPKWVANRKKDITQFNHVSMREDFSVQIMKDIFQEEVIQALDPTYLVERSEYDSLADQATFKRQESGDYMAVFFLDINKEKVRVALAIAEKLGLKLVVLPNPLKGRELAKKTFPNTVEYVSEDTPENFLSVYREAKYIITDSFHGTVFATIFQKPFSIFYNEQRGIDRFNSLMNLFELGETRRVYEQNTKQEIEENKNISLALDYQKTAGKIAREKEISDKWLTDALTSKFSPDEDEVYDEFRRYIINKPLDFYRAKTTVPISAAIVLSPNGTIKNSNPNESFWKLTDKELIFMNNHREVTTRFNREKFKGKETFSPFRIVGKYVKDEKIEHVMYLHPIQKPKPKPKQGTEKKALAIPENLLTRKQLIMKIVQNERIRSWKQDLLEELPDLELFVGRELKEYASNFVGGPADLLIFPKTIEEVALIVKYAKNNQIPLTVIGKGSNILVRDGGIRGITLNMTALNYRKITGNVLTVSAGASLIETSYYLLEHLKCGLEWADNIPGTIGGAVYMNAGTVKDINSMFLEATIVDENGEIKVLNKEDVQFSHRYSSFMDHPEWIILETKLQISEGNLENMVNDMVGTVEIRERMHPLTHPNHGSTFTWGRAPRLIQQAGLVGTRIGGVKVSEKHPGFFINVEQASAQDYEALIYLIIAKVYEFSGFLLKPEVRILGANMWEASLTFK

SEQ ID NO: 5748 - protein, 287 aa, Enterococcus faecalis
RRLKMNDLWNFLDNHPEEKELIKAKALQGYTVDGILNDQLNFVALDTLSIGLEKFGNIHYSIQIPEFNELLSKKMVVLFVPADGVGHSGAKERYFGLRQWNTLSQSVRKNTIILRIADVGFVSGSYYTLFEQEILDLIEAKKTEFGLKHQDIIFYGNSRGGTGALLLGITGNYKTVSVDPVIDREPWVNSADGRIDRQLMFDFVEMDFSNRIKDKMEQSNYELENITVIASEANKKMYEKIYPLSNGFTLKKLELMIDSENTIGIHGLTIMESIHLQLALINNYLFD

SEQ ID NO: 5749 - protein, 842 aa, Enterococcus faecalis
VREICFMENVKVSVIVPVYNVETYLEEALMSLKNQTLKEIEFLIINDGSTDNSQKIIEEIAQDDPRFRVFNVKNGGIGKAFNLGVSEAKGEYIAEFESDDYVALHAYERLYNTAKSHHADVVRCNWVEFSSEEEVERDILWQYPDKYNQLIDLKTTDLIVQVYPWNAIYKKSMIEKENVTWDEEIKSYGDTGLFWKINSASQNVIFIKDCLYFYRQDNPNSTVNNVATKVPFLFQQFKLIRSNLIEQNKFERYKGYFYKQMFEKYFWAIEKLTHLRDESVYEVIQKVAVDFRQALETDQLNDIDFEYIKQFYQIANDPAAYYEDYLKNLYKVSVVMPIHNASKYLRQTLETVCEQSLREIEIILVENGSTDNTMDIINEFAVKDPRITGISIGKSNPGHARNVGISMARGRYLQFLDADDHFEANLLQDAYYRAYDSATDILLFGMKEKLPNGEVHVVHNPLLTNGGRMSGEEISLDEVTPYLYDKLFLLEYIKENNLVNLEQFVGEDAYFTYTALLGTEKIVALNKYLLTRIVRQDGLMSTYGMNYRDEFNLHDKMLEYLKQHAPNRIEAYRLKIINTLNWFIFDMNRVDQAFKERFYQELKEKYIQQLGLDLVKKEKYSNDPEQVERITRIQNILQYNLEIYQNIYKDFGMKKTFIIPNVHIQERGGKVIFGQEKTQGNGTAIEMFSIIIADNDTSNASGVIDFVYMGDNTKIIHDSLLVSLLIKKEGTTLKSIVLQAEWEKGYTLLQENMYYTFVDNVFTIWAGYTQKYAAFDYNVRILTSREGETHFSVVRQNQGYIQDTMTSIGNELTPINKIEGNEPTTIKKAVSKSLKKAKGLLK

SEQ ID NO: 5750 - protein, 494 aa, Enterococcus faecalis
KAGGCRLEKQKEVQKEYEEYQYMLDTETWKKELSQFKLSSSEKISKNPKVSIIIANYNNAPYLKKMMDSLVQQTIGIEQLQVMFIDDCSTDHSLKVIEPYLERYPNIEIYQLLENTGGAHGPRNVGIVNARGEYSVFLDADDWYDLNALKYLSDLLDDSHDDFAVSGLIQSTDGHLMLKSKPYYVDGSFKNRSIQELPAEFYGWLGPQAIMLRTSLIHNNNLHFVNQRVADDVLFFYEAMRFSKTITQGERLTTYLNRDADNESLSKSINRTFMLSWLRALSYINQQFPDDLSKERMLARRLEWLIYDFCIRRNTGYPFSKRRLQDFKVQMDQYLGELNFDPSPYFRSDVRQIIWTFLQTNDIDGLYWFIQCQSIRWVLVNRFGYVSKTERSYYYPRLLKRFPAVRMNAYAEATQREGNTLSLNVYTHQKITGFEIKELKNPFETRQRLAFKKISETSYQVELPEKFSNKESRFTIVFDNYLEIGVKDFSKFFA

SEQ ID NO: 5751 - protein, 393 aa, Enterococcus faecalis
RINSMKKFLENSIHQAIKACFFFLGKLPKKKLFIFESFHGKQYSDNPRAIFEYIRDNCPEYQCIWAVKKGYEMPFVEENVPFVKRLSWRWLWLMPRAQYWVFNTRMPAWMYKNQTTIYIQTWHGTPLKKLGLDIETVKMPEHETESYKLEVIQEAKRWDYLISPNAYSTRVFRQAFHYEGEILEIGYPRNDLLVCENKDKIAFSVRNQLGLAANKKIILYAPTWRDDESIRKGAYRFTNHLPVEQLLEIDSSIVILTRLHYLIAESFDISAFGSRVIDVSSYPDINQLYLIADLLITDYSSVMFDFALTKKPMLFFMYDKEKYQNSTRGFYFDPTAILPGKIVTDTDSLVTSVKNVLFSKTEQEQRLYVQFFREFCLENQDATRQLISEILKR

SEQ ID NO: 5752 - protein, 192 aa, Enterococcus faecalis
IFAEMQTISFIYCHCQVVVRCFVISKNTYTIEEAGFPVIVSLYVGMGFQNFISARSAGFEVLLFALFIVWATDIGAYLFGRRFGRHKLMPDVSPNKTIEGALGGILSAVVVAALFLVFTANKGLFPYPMPVMLVLTVLFSIVGQFGDLVESSIKRHYGVKDSGNILPGHGGILDRFDSLLFVFPIMHLCGLF

SEQ ID NO: 5753 - protein, 88 aa, Enterococcus faecalis
KNEGVREKMTEQMWIEKLGLEAHPEGGYFKQTNKSEQLIPTKRGERALHTAILFLLNTESPSHFHRLKADELWFFHDGQPLTVHCIFP

SEQ ID NO: 5754 - protein, 464 aa, Enterococcus faecalis
PRWRCQSGRKIYFNAVGRRPIRMGFFDKIKKAFSAEKKEEEKQEIVEETVDETPSDESAPAESKETATEEAQITPETTAEEVTETADLTDNAEMEKLVDVEEALEEEPEEILTEETQEVVVEAPEEESSVVTPLAEPTDTQVSEEIEESKEEQVQEKYEKGLEKTRKTFGQRLNELFANFRSVDEDFFEELEETLIGADVGFDTSLKITEALRQEVKLRNVKKPAQVQNTIIEKMVDLYEEAGINENNAINLQPNGLTVILFVGVNGVGKTTSIGKLAHQYKLEGKKVLMAAADTFRAGAIDQLVVWGERAGVEVVRGNAGGDPAAVVFDAVERAKAEQADVLLVDTAGRLQNKVNLMKELEKIKRVIQREIPDAPHEVLLVVDATTGQNAMTQAKQFKETTDVTGLVLTKLDGTAKGGIVIAIRNELHLPVKLVGLGEGINDLEPFNANDFAMGLFKGLLKDV

SEQ ID NO: 5755 - protein, 283 aa, Enterococcus faecalis
PEARRSERLIKLVAIDLDGTLLNSQKEISLRNKQALMAAKQAGVKVVICTGRPLAAIGPYLEELGLQDEGDYSITFNGGLVQKNDTGAIIEKTLMPLEAIHELYQLATTLNMPFDVLSDEVVMQLPSAPNYPSIYSSLNKLLTFESYKLEELTPNRIYNKVVVAIDEAYLNERIKEIPASFYERFEIIKTRNNLLEFMPKGITKAYGISLLAKDLGIRAEEIMTLGDEENDLPMIEYAGLGVAMANAIPLVKEAADVVTDTNDQDGVAKAVEKYILTPLEGGQ

SEQ ID NO: 5756 - protein, 1208 aa, Enterococcus faecalis
AGTEKYSSVRLEGAIFVYLKRIEITGFKSFADKTIIEFEDDVTAVVGPNGSGKSNITEAVRWVLGEQSAKNLRGGKMNDIIFAGSEGRKPLNIAEVTVTLDNSDHYLALDYSEISVTRRLKRTGESDFFINKQACRLKDIQDLFMDSGLGKESFSIISQGKVEAIFNSKPEDRRGIFEEAAGVLKYKQRKKKAEQKLFETEDNLSRVQDIIYELEDQLVPLAAQADAAKKYLALKEELTEIDVNLTVTEIQEAKAIWETKTQELTAIEEKLAGASKQVHDLEGKLVRLRSKRNRLDEQIETEQQQLLQVTEALKQAEGQKNVLIERSKHTSQTASEYEETLAETAEKIVRYREELQTLETAIAEKTAQRQTLKEALALATKDVEKYSKSSKELMEELRSQYVEVMQEQANTANDLKYLERQYQQETAKNQQSLAKHEALEEQMVEALAMKETLEKEQKVAKQGLQEQLEEYTALKATLEAKRERLAQRQNDMYQAMNQVQQAKARQKSLQEIQENYAGFYQGVKAVLRHKNQLTGIVGAVAELIEVPKEYTLAIETALGGAAQHIVVENEKDGRAGITFLKQQHSGRATFLPLTTIKPRSVSAMVQNRLAGAPGFVGIASELVRYPEQVQTVIQNLLGVTILAADLTSANQLAKLVNYQYRVVSLEGDVMNPGGSMTGGANKRGNQGSLFSQAQELQTITEQMTQLETQLRSVEQEVQALSQEVKTATERAEMLRSAGEQNRLKQQEIDNKLANQTETITRLTKEKRLFEYESRELHQFLTEYQTKKATLTEQQANLTATKERLDAEMKQVEQEASQMETFKAQAQERLTTVQAEQAVAAEQCAHFARQKQDKQEQLDELLIRETAIRQQLQQLSSHSSDHQLTEEGLAAQVAQLAEKQTALQTSLQTARSQRQALQEEVDELDTKLAEENKRQQQYLADKTQIEVLKNRAEMQLDSSLSYLQEEYSLTFEAAYEAYFPIDDLAQAQQTVKRLKQEIERLGPVNLSAIEQFEQVDERHQFLVSQRDDLLNAKEQLFETMDEMDQEVKERFKEVFEAIRGQFKVVFPNMFGGGRAELVLTNPEDLLNTGIEIEAQPPGKKLQHLSLLSGGERALTAIALLFSIIRVRPVPFCILDEVEAALDEANVARFGHYLSEFEDGTQFIVVTHRKGTMEAADVLYGVTMQESGVSKIVSVRLEEVKEGGAIEKSN

SEQ ID NO: 5757 - protein, 73 aa, Enterococcus faecalis
MRLFMTFLDLFAGIGGFRLGMEQAGHHCIGFCEIDDFARRSYKAIYDTSEEVEMYDITSVSDEFIQSLGPVDI

SEQ ID NO: 5758 - protein, 287 aa, Enterococcus faecalis
KWKADIVRSVGRCKMEININKKDLKKASRKFRQLASRVLNAHYSEVNSIIKMFVEYIDSTPVIYEYIQDVFVEYPNLEDEIKQVSESYGRLILTTGKTPEQEVSSVYQILKYISENLSTNTTFLGWGYTSSRAYQDMVKEFGNRVVMPFVDQVNVYLSDIATDMGYDEERKYMIHVSGGQAQVNISNDNSTINANQNVQINQSKVDDLISDLKSNIEKELVDNEPIKDVLLSQLALIESQQTESEPQKNVLKTAFETMQSLLKTAPLAVTAVESCNRLYELMSPLFN

SEQ ID NO: 5759 - protein, 160 aa, Enterococcus faecalis
VFPKGDVSMTVDTTFNISIPSDSDGFIFLQCTLCGEYFKLTLKDLEDESQLHVWCPKCGLTPDSLFTDEVIELAMKIVHNHVSDLLNDFGKNLSKSSKNGSVKFKSVSKIKKDPVDPIISKLDNLELQIYDCCHKEAKISPSLKMEGGYCPFCGEMQDGD

SEQ ID NO: 5760 - protein, 466 aa, Enterococcus faecalis
NCPINPIGQFLIGGGNHQMYKGHRIRARNQHLIYHFVLGWLLALFIGCMSVFYFQELRQFEISKLSFSTSEIDWSTKDLICLLGSLALSGGMILLYIHFFHDHWRSLLHRRKLARMILENHWYEVKQIQSEGFFKDLNGIRTKESISNFPKIYYRMKDGLLSIRVQISLGKYQDQLLKLEKKLESGLYCELVEKELKDSYVDYTLLYDMIANRIGIEEAVVENGALRLMKNQVWAYDFLPHMLIAGGTGGGKTYFLLTIIEALLKSDAELFILDPKNADLADLGTIMTHVYSQKEQISACVEDFYERMMVRSRLMKEMPNYKTGENYAYLGLSPNFLVFDEYVAYMEMLTTKESAVILNKLKQIVMLGRQSGFFLILACQRPDAKYLGDGIRDQFNFRVALGRMSELGYSVMFGEVDKIFFMKQIKGRGYVDTGGGVVSEFYTPLVPKGYDFLESTKTIVQNNINI

SEQ ID NO: 5761 - protein, 117 aa, Enterococcus faecalis
VKSMEIDVEHIFDCLDRYGKGELTEKQLTKGVTDDEKMFLIMHQGLLGGNTDSEKKFNVLDWLGEKESFFMIVEINENLCRKAESILEEIGVEMPDVIESFLKQLVETKQLPVVVND

SEQ ID NO: 5762 - protein, 127 aa, Enterococcus faecalis
EDKNMRLTEGIVVDSGLTFGKLRFSALRREVRKQNEDGTVSNEVKERTYNLKSSAQGRMIQVSIPANVPLREFAYDTEVELVNPIVDTVANYAFREGTTVNWFIKADDLVLKRQSNQGNTHQNEGKK

SEQ ID NO: 5763 - protein, 109 aa, Enterococcus faecalis
KEEKNMELKFVVPDMAETFGKLGYAGEGEILTEGYGRNTVVIGRSYHLYSSKQRADDIEVVVAAEAGEKDFDQDQPLKAVNPHLVAKGYAIENRGFTDYVLYVDDLVKA

SEQ ID NO: 5764 - protein, 1096 aa, Enterococcus faecalis
TFETFRGECLFFITQKRKGINYMKKTTFKNWPLFATLALLSQTIGGTIGPTIAFADEITHPQEVTIHYDVSKLYEVDGTFSDGSTLSERTTSLYAEYNGAKQTVFCIEPGVSIPTEVTHGYQKNPLPSMSDKAKLVSVLWEKAGTDIDTNMVAQKMIWEEVNGYKLHSIKRLGGASVDIKSIEGKINKAIEEYQKKPSFHNTTVKTILGQSTTLIDKNELNLSEFDKVVQNTANIDYRVIGNQLVLTPNSNSKSGTLTLKKSAGTGTPVAYKKAGLQTVMAGALDKPNTYAIKIDVETKGSLKIKKIDKESGDIVPETVFHLDFGKALPSKDVTTDKDGISILDGIPHGTKVTITEKSVPDPYMIDTTPMAATIKAGETISMTSKNMRQKGQILLEKTGVETGTDLWNDNYSLAGNTFAIRKDSPAGEIVQEITTDEKGRAETPKELANALELGTYYVTETKSSNGFVNTFKPTKVELKYANQTVALVTSNVKGQNQEITGETTLTKEDKDTGNESQGKAEFKGAEYTLFTAKDGQAVKWSEAFKTELVKGTKASDETVTLALDEKNQVAVKHLAINEYFWQETKAPEGYTLDETKYPVSIKKVDNNEKNAVITRDVTAKEQVIRFGFDFFKFAGSADGTAETGFNDLSFKVSPLEGTNEITGAEDKATTACNEQLGFDGYGKFENLPYGDYLLEEIEAPEGFQKITPLEIRSTFKENKDDYAKSEYVFTITEEGQKQPIKMVTVPYEKLTNNEFSVSLNRLMLYDLPEKEDSLTSLATWKDGNKKLNTLDFTELVDKLRYNLHEIKEDWYVVAQAIDVEATKAAQEKDEKAKPVVIAETTATLANKEKTGTWKILHKLTAEQVLDKSIVLFNYVYENKVAFEAGNEPVAKDASLNNQAQTVNCTIERHVSIQTKAHLEDGSQTFTHGDVMDMFDDVSVTHDVLDGSKEAFETILYALLPDGTNKEIWKSGKIEHEVNDKEFTKTVLAEKVDTGKYPEGTKFTFTEINYEKDGNVNGKHNEDLKEKSQTLTPKEVPTIPSTPKQPETPAVPSNSQESSPTVKTFPQTGEKNSNVLLLVGFILIFSTAGYYFWNRRN

SEQ ID NO: 5765 - protein, 61 aa, Enterococcus faecalis
IFTMRPSKIEGLFLCSKRKAGFMNKCKMDKYEDGKDIPNTARIIQYAHIGKVSLEFLIYGI

SEQ ID NO: 5766 - protein, 610 aa, Enterococcus faecalis
MMTNNSNIEVALVVEVNGIRCKAITFDDMNQATYINNGEVIKNLSVNSFVVIRQNFIKIIGRINSESIWDTQNNKQNYQLDNRFSKNTIKRILDIQIIGYISEGCFTTGTTYIPMIGNICSIPTTEETQTIYVNSFDHFNGDQTIKIGKSLNEQIEVNLPISSFFASHIGIFGNTGSGKSNTLHKLYFELFKQSFPLLREKSRFVVIDFNGEYVHDNSFGVPKSEKNIYELSTRTVSNKRLQIKRDIFFSSEILSILFSATQQTQKPFLERVLKGINKFGFGEESLQRWISSILREIFTTFPNMDLKNRFVSILGEFYDSSEALEPIKQAQIYSKDDPAKFIVNGTFFDGNWESKHMQAVNLEQVENVILTEKLNIFKEFELRCKLQLVKDLLYRNVISDHIDPLLKRIDSRIEDFQKYIEIVGQIDNVKFLEIISLRDLNQEAKQIVAMLTSKMFFDEQKTSKDKVSFHLIIDEAHNILSDQSRNDNTSWKDYRLSTFEEIIKEGRKFGFFLTLSSQRPADISPTLLSQVHNFFLHKLVNERDLQIIDNSLSTLDRVSKSMLPGLSQGICIITGTALSLPMIVNVDFISDKTLRPQSDTVDLVEAWVNE

SEQ ID NO: 5767 - protein, 467 aa, Enterococcus faecalis
IPILEGTIMTISKVKALRAVLSEKRTTFLFGAGASVPFFSSLGKIEEYMTSKDITEEGKRLVMFAFYYIAIKDNSILVEYIKKGESENHLDSGSSVMNQYSRFIFNCVEFLKLRNSRVSPRRTNIFTTNYDLFLEIAVEKNIESNPKIFFNDGTNGYMKRYLSTENFNKTMLYAGAFDNYANELPTINLVKCHGSVNWLNEQNFIGRDRVLVDNSLLDTIKTAEKAEEVWSELQNDIVHDTNFQRSFTIEILKDVILGKPVDGFIDSPTEVINYFGKKYYNQLQGISEKISEIQIVLPTKRKFQSTLIEEQYFNMLRFLSYELEKEQSVLIAFGFSFLDEHITDIVQRSLNNPNLLVFIFCYKDGTKGEIINQFSFGANAVPSNIVFITPSDFIMEQAENEEETPLPLETNQIRSNDSTIVTYSEEVSVYDNKDAVIDFEAFNRIIEGNLSEKYIDSQYTEVVDDDE

SEQ ID NO: 5768 - protein, 314 aa, Enterococcus faecalis
GGAFFMQINKDELIKMGNHLKEARLSKQLTQEELARLSNISQATIVKYENGLRSISKKNDRILSDVLGAESFIKDMIQRKQQVLIDLEKYQTKNIFSREDLSKKLGIEISLLNKFLNQSRPLSKNAIVKITQLLSNEGKEILMDIKQEDGSFKLPIIDKIAMGKRIQEIRKNRGETLEKFGKNFTRPAGKNVVNRWEKGTNIPDIERLMNVAYLGKVAVPYILYGETFSKMLKKGSRISKFEKLDSFRMGLRLRKIRRDYRLEREDFGKFFSPPITKWSMDKYENGKDIPNTDRIIQYAYIGKVSLNFLIYGVN

SEQ ID NO: 5769 - protein, 78 aa, Enterococcus faecalis
KWTTKITRNSLFPTENPVISIFLSGEKSVIYPFKKVSTVIRLSQLNKKGQKRNNFLEDFYLSAYDESISHKEVLFSCK

SEQ ID NO: 5770 - protein, 267 aa, Enterococcus faecalis
FGFRCGFLGLLHMDVVQERLEREFNLELITTAPSVIYHVNKTDGTTVVVDNPAEFPEPVTIESVEEPYVKAQIMVPNDYVGAVMELSQRKRGEFITMDYLDDYRVNVVYEIPLSEIVFDFFDKLKSSTKGYASLDYEMAGYRTSRLVKMDILLNAEKVDALSFIVHRDFAFERGKAIVEKLKKLIPRQQFEVPVQAAIGQKIVARSDIKALRKNVLAKCYGGDVSRKRKLLEKQKEGKKRMKQIGSVEVPQEAFMAVLKMDDQDNAK

SEQ ID NO: 5771 - protein, 92 aa, Enterococcus faecalis
LIKVDKKRVLHPKGRSTRVTTQIQSRVAPTFSEIDNGNYPAVPTQVFRTASRIEDLFNASVCQTFTIIDSLLRINIKRSVLSILILLQLFLQ

SEQ ID NO: 5772 - protein, 380 aa, Enterococcus faecalis
IDKMKARQMHMKMKETLQLGKTAFPMRGNLPNREAEWQKDWEEKGLYEQRQKLNEGKPTFVLHDGPPYANGNIHLGHSLNKISKDIIIRSKSMSGFRSPYVPGWDTHGLPIEQVLTNKGVKRKEMTVAEYREKCKEYALSQVDKQRNDFKRLGVSGDWEHPYITLDPEYEAAEIRVFGKMAEKGYIYKGLKPIYWSPSSESSLAEAEIEYKDVKSPSIYVAFNVADGKGLLDNETAFVIWTTTPWTLPANLGISVNPDFTYVEVKADGRKFVIAKDLLTTVKEAIGWEEVEVLREFSGEKLDRMTAQHPFYDRTSLVMLGDHVTLDAGTGLVHTAPGHGEDDYIVSRKYDLPVISPVDSRGVFTDETPGFEGISMTKRIQ

SEQ ID NO: 5773 - protein, 565 aa, Enterococcus faecalis
RNFYDKANPMITELLEEKGALLKLDFFTHSYPHDWRTKKPVIYRATPQWFASISKFRQDILDEVEKVDWLIPWGKTRLYNMIRDRGDWVISRQRAWGVSLPIFYAENGEAIITPETIEHVANLFAEHGSNIWFMREAKELLPAGFTHPGSPNGEFTKETDIMDVWFDSGSSHEGVLREREELTFPADMYLEGSDQYRGWFNSSITTSVAINGVAPYKSIISQGMVLDGEGRKMSKSLGNTILPEKVINQMGADILRLWVSSVDAEADVRVSMDILNQVSEVYRKIRNTMRFLLANTSDFNPAEHTVAYADLRSVDKYMTVRLNQVIQEIRENGYEKYNFMHIYRTVMNFLTVDLSSFYLDFAKDVVYIEAENDYQRRCMQTVFYQTLVSLTKLLTPIIPHTAEEIWSFLQEEEEYVQLAEFPGYETFTNEEELMDTWAAFMDFRDNVLKALEEARHSKLIGKSLEAKVTVYPNEQIRQLMTAVDADIAQLLIVSDFEVSKEVAPSEAVQFEDMAILVEKAEGETCDRCRSVRQDVGSDEKLPTLCGRCAHIVEENYPEAVAEGFE

SEQ ID NO: 5774 - protein, 510 aa, Enterococcus faecalis
GKLMNEKVALFTIFGGTGDLAKRKLYPSLFRLYKKGLLAERFAVIGTARREWTDEYYREIVRETIQDLNPTAEEATEFSSHFYYQSHNVNDTEHYNTLKELSDRLNEQYHLEGNHVYYLAMAPQFFGTIVNHLKSQHIISEEGFDRLIIEKPFGSDYESAYELNEEIRAAFPEQDIFRIDHYLGKEMIQNISAIRFANNIFESQWNNRYIDNVQITFAESLGVEDRGGYYDHSGALKDMVQNHILQVVALLSMEPPVAFSEKEIRTEKVKALRAIRLYSEEEALQNFVRGQYGEGQLADQTFAAYRDEPNVAETSSTETFVAGKFLIDNFRWSGVPFYVRTGKRLTEKGTRINIVFKQVPINVFKDDTCEECDKTDLPPNVLTIYIQPTEGFSLTLNGKEIGQGFNTTPVKLDFRQSAEMTENSPEAYEKLLLDCLNGDSTNFSHWDEVAQSWRIVDIIRHAWDKTDVSFPNYAAGTMGPQAAFDLLEKDGFTWEWQPDNWYRDRGQLDQ

SEQ ID NO: 5775 - protein, 224 aa, Enterococcus faecalis
ALMTPFREDYLKLIFELGGDEVKVNNTQIVYGLDVSAASVSEMISKLVKEDLVEHSPYQGVQLTEKGLKGASTLIRKHRIWEVFLVEHLNYTWNDVHEEAEVLEHVTSQTLVNRLADYLNHPEFCPHGGVIPEDNQPIHEEKRQTLTDYPVGTKIRIARVLDEKELLDYLVSIDLNIQEEYTIKEIAAYEGPITIYNENKELSVSFKAANTIFVEPLIRESEEN

SEQ ID NO: 5776 - protein, 128 aa, Enterococcus faecalis
RLGGISLKKHWTFLVGASLLTGLAGSIFWKKNKQLPSPQELQHNYTGHWWFVDVKKATQHTLDITSSFNVFIDGKQTHALLVELTPKRLVILDKLGYHLIIQCENGVPATLYDEADDETYTLERAIYN

SEQ ID NO: 5777 - protein, 66 aa, Enterococcus faecalis
NKQVGHSGTSYTDFLSYTLYHKKTRKSIDQNQQFYYLVSIIKYLSILSDLVEYFRQVLYNKGNEDE

SEQ ID NO: 5778 - protein, 272 aa, Enterococcus faecalis
LTQDSKIVGFGLYFSLFFYGIVCKKGSLCMKYPNVQLAYFIERPNRFIAHCRLMETNEEVITHVKNTGRGKEVFLPGAVVALSYQPSPKRKTDYDLIAVKKGSFWINIDSQVPNTLVNEALKNGQIVLPGLVGTIQTVKREQRFAHSKFDFLVETDADEQAFVEVKGMTLENKGIGAFPDAPTLRGLKHVTELMAATKAGYRCYILFVVQFEEIKQATLHQEMQPAFAENVGAAIDQGVQVLAYNCHVTPATIELKSQVTFDLLQAFDDPNK

SEQ ID NO: 5779 - protein, 341 aa, Enterococcus faecalis
INKKWRFLIMIHLGVIGTNWISHQFVAAALETGAYDLTAVYSRKLATAQEFGSRYGDVEYAIDLETFFGIAHMDTVYIASPNSLHFEQAKQAILAKKNVIVEKPAFSTPDEMAEIIELANKNRVYFFEAARNIHEQSFQKIAELLPLKNQILGANFTYMKYSSRYDQVLEGKEPNIFSPHFSGGALADLGVYLVYAALGWFGVPNESHYFASKIATGVDGLGTIILRYDQFDVTLNTGKISDSFAPSEIYFENGTLILDSVNAISSAEYHDRAHEERDVLDIQVADNPMIEEARDFAAVLNYPTDKYWGTKYEEWVELARNVNKVVNDIRHSAGIICDADK

SEQ ID NO: 5780 - protein, 437 aa, Enterococcus faecalis
ERNNMRFLEQLPEAWQEQWQASGFNEPSTIQEKSFTPLREGENVLGISPTGTGKTLAYMLPLLLTVEKGQGNQLLIIAPSQELAMQIAEVARTWAKPLQLKVQTLIGGANVSRQIDKLKKRPEVLIGTPGRILELMKNKKVKAQLLKTIVMDEVDQLFQEEELSLTKQILTHTPTEYQLVFYSATADRVVNQAQSLSQKLQVIDVTEEDTSAGQVAHYFIRLAPRKKADYLRRLAHTEAFRSMVFFNQVADLGAAEEKLVYENVPAIGLASDQSKQLRKLAIDQFKAERVKLLLTTDIAARGLDFTGVPYVVNVDVPLTEESYIHRSGRVGRMGAQGAVITFINDGTKRDYQRLMKQLAIPYQEIFLYDGALHEQPKAKDELEKKNVVKDTYSEKKSTKERKPETVNSVVKEPQETRKKKKNKKKNTKNKGARKAKK

SEQ ID NO: 5781 - protein, 490 aa, Enterococcus faecalis
SEEITLYELQAERCIEEDSMKSRKEEILALLQKNETGLTAGAVAEQLMIDRSNASRYLNELFKEKKITRSTGRPVIYSVPTINEGEQVHVDESTSVSFDTLVGANDSLKVSIQQAKAAILYPPRGLHTIIFGKTGTGKSLFAECMYRFAIDSKTLDEDAPFVSFNCADYAQNPQLLFGHIFGVKKGAYTGANEDSPGLMAKADGGILFLDEIHRLPPEGQEMLFTFIDKGVYRPLGESGQTYEASVQIIGATTESSENFLTTFNRRIPMSITLPSLDARTLDERYAIISLFIQQEATRLGQQIDIEREAVLAFMLYDAEGNIGQVKRDLKLVCAKSFLYYRTHNLEHLVIRKRDLSLPVQKGLLKIKEVPERLDQFVDSKSNYLSFQPGTNKIVWSQDPARDMQVYNEIEEKVADLSEADLENVDLEELISKDMNAYFKNYVEELTQHSLHKELLPEAIWDLTNRLYDIAEERLEHPYYETCRFASISTI

SEQ ID NO: 5782 - protein, 565 aa, Enterococcus faecalis
PISVVNMTTLTICLQIAGTLGVPKLVGKLIDVGIVSGDQQVIKTIGIQMFLVAFIGTIAAIISSYLSALVAAKFGFQVRGLFFKKFQQFSMKNVDKFGSNSLLTRMTNDVDNVQTMIVLFCQLIFPAPIISLFALVMTFSYSVSLAWVTLASIVFYLVVVYFLMKKGTPLSLKIQPKMDRITTTLREFFTGINMIRAFNNQDFEEQRTNQTFKNYAERMSKVNQIFAWITPVAFLLMGVVYASILWFGGNLVAVGTLQIGTVTAVIEYTLLTLAYLMIAAMVLVVIPRSVASLNRLQEVLSEEIEISDPHTEATIAYHPEKALICFDHVTFQYTETADPVLENVSFVIPKGKTTAIVGATGAGKSTLVKLLLRINEVTAGTISYSGTDIRSLSQQTIRQVISYVPQKAFLFSGTILSNLLMGNAKATTEEIRTALEISQSSEFIDSLPQGIESFVAQGGSNYSGGQKQRMCIARALIKPADVYIFDDSFSALDYKTDAALRAALHAQMSDKTLLIVAQRLSTIMNADNIIVLDEGRIVGQGTHADLLTTNSYYQDFAKSQGILPK

SEQ ID NO: 5783 - protein, 601 aa, Enterococcus faecalis
KKVFFSSHTMKKTMNLQSFKRFWKMIKPEHPIFYGLMICSLIGNLLIVAMTYIMAIGIDNLLEAIKRVGLKGMTLPLVEEALLGPVLLLILFSIISSITSFIQERAMASLSERVTLRIRKEVTKKFKTLPMAFFDNHQVGDIISRSTTGLNQLSQVLLTGINQFFTSVVTILFAGIMLFYIDAKLTILVLLLIGGSTFMTTKIANKNKVFADQSQAELGQLNNKMEEYLAGNLVTKTFNQQQNAEKTIDAVNQQHYRAFKKAQFLNFAIYPAIRFINQLAFIISAILGAMLVLSGGITIGFLQAYLQYINQISEPISTASYVINSIQAAMASIDRIFVILDEADEQPEATHLETISSPKGAIEFKNVQFGYTPEKILMKNVDFSVQPKKTVAIVGPTGAGKTTLVNLLMRFYEINQGAITFDGIDITKLSRQNLRNLFGMVLQNTWLFEGTVADNIAYGKKDASREEIIEAAKIAQCDHFIRTLPQGYDTIISSENGALSQGQQQLLTIARIILANPPVVILDEATSSVDTRTEAHIQKAMETVTENRTSFVIAHRLSTIENADLILVMKNGDIIEKGTHQELLQAPTLYASLYNSQFQTT

SEQ ID NO: 5784 - protein, 335 aa, Enterococcus faecalis
TMNTILTGDRPTGKLHLGHYVGSLKKRVEMQADPTNQLFVMIADLQALTDNARNPEKVSANVLEVALDYLAVGLDPTKTTIFIQSQIPQLAELTMYYLNLVTTSRVRRNPTVKAEIEQKKFGEGVPTGFFIYPVSQAADITAFQANLVPVGEDQKPMLEQAQEIVHSFNQTYGEVLVRPEAVLPPKGMGRLPGIDGNGKMSKSLGNGIYLSDPAEVVQKKVMSMYTDPNHIRIEDPGQVEGNMVFTYLDVFGKNKEYIEELKEHYRHGGLGDVKIKRYLIDVLEEELAPIRRRREELAKNPEAIMEMLHKGSLAAEKVAAQTLTEVKKAMGIQYF

SEQ ID NO: 5785 - protein, 1282 aa, Enterococcus faecalis
TCWRKTEKSFFKIIKIKTVKEQKMRKKAYFKSVTIFLSILLVFSQLQLFSLPAYGETVSDQPLLFRSVGVAQSGTTYYVDGEGGNNANDGQSPASAWRDFEKVNQTEFQPGDHVLLNAQSTWNNQLLHPKGNGTAAQKIVIDFYDTNDKGETIFETTRRPIINGGGTYSTGTFKRAISGAVQLVNQEYWDISNLEVTNTPELDNLEGYKKPGDAQRAGILVLGYEQNRTFNSVTIRNNYVHDVQTEYYLNLSGNTATKRLKAVGGIIVLGSWFDENGNVVTAANDHRTTTGFNDILIENNVIQRVGLEGIRTKADSDTSRGNTFYKTFSNITIRNNYLEDIAGDGIVLSEAKSGGVVEGNVAVRMCNADYGTQNYAGVWAMSVDDGLFQYNEVYGIKYGFNDAEAYDVDMQSNNVIYQYNYSHHNTGGFLLLMSDQKNSVIRYNISANDGGGNRRTGKDNPRGAGGYNYKEQSIFHYWVKNDGAAMPTIHNNTIYVGDGISTSLFGEGNSSDNSGTVANFYNNILYKEGTGQLKFLSNYPTNGTQPIERKMVDNPEKYFKNNVIWPKEIATEKSGATVEKLVSSGNIFEKPQLEITDNPEKVKELAEQEFTTLKPTKDNVVEFTSKERLRQRAQMFRLKENSPAIGKGLSEVNSPAEDFFGNSLKNKVLDIGAQQASTIEKSIRYQNQVLEISSATGVYPNLPEQVELTYEEVVNEEVVATGKKEFKLQWEAIPQEKINTAGTVEVAATVIGLPIDAVKVTAKVSFEGELGEGKDTVKLKTAQTAYVQKSDGNRAYSAIAGGTAAISSGDAYKYPYGVNYTGNYALKLKNASSAGYNRRIYVEIDTQELKNYQSLKSANLELNVMRYDAWNGAGNTNDERLKNTQFQVDVYGTDTNWMSNTITWNNGPNNLNVPNEEFIARQSFTNSSIMNNQNTISIDISNYLRKLIQSGEKIPAKLSFLLAITDSRLPGYDSDNAGFDAFSKEGAQKAYQDFLTGKLTLPTGQQLAEDSLAPKIVLSNVFEVKHESIEVTTEAGQAPKLPEKTTIFYSDGSQREVTVNWSEVPASSYQKEGIFTVVGRAAGVSMPIIANVKVTAKHIVGFKELPALDRLTGTSRGELNLPTEVIAKLDDGSETKLKVISWDDDVSNYSPSSPPGTYQFPAAVEEKIGIANPDERKIFQVVQTHAIPERIQFATETATIKSGENYQIQSKVIGQAPHTETDAWSSQVTYELVTPDAGNTVSVDENGLIRTEATTAAGNYQIKVTSKVLPIVTAQFSIKVTK

SEQ ID NO: 5786 - protein, 360 aa, Enterococcus faecalis
FGETIMCTGIKIISKTNDIFYGRTMDFTFDFFGNEDPIAPKIPTLIAQFPKGTVLNSQLNPWTAKYAFMGLAMSGTDQPANDGKTVSLAITDGINEAGLSGDIQYLMESSTAPAESLADRGLTPHIAEEVLAYILSNFESVDEVKVAFEKIGLLDQKFQLDSLGEVHFTLHWTINDKNNNSIVLQPTDNGAFVIYDSIGVVTNSPEYNYHLTNARNYIGMRNYAIKEPYTLKSGATLDPIEGGTSYGLLGIPGDFTSPSRFIRALYYSDNLQEFDSSEGIMQLYRAFQTVMIPRGIGHLGQSNSLSDFTHYWSGYDVTNLTMYVQPESTTSFTKYTLDPALTEVTTFAVSNELLLTDLNQ

SEQ ID NO: 5787 - protein, 226 aa, Enterococcus faecalis
KILKRGNKMNLTHQDFNLFNREIFTFKQLKEQQTSAEIDALKQTYKQHWEKWKALNLAIAQGLPAELGITKPKIESWTNGWNLRSHFWAAYRSEQRQAENACLALLLNKKQFQVYLMFQHYKSEERTGSVVAYNQLLNRLEAWSQTIDCEGYYIWPQEEHELVDHLPLKDYLADEKQRKILEERIGNRSFQIGKLWFATEKLETIEEKSCQALQELAPLYNALSEK

SEQ ID NO: 5788 - protein, 411 aa, Enterococcus faecalis
KKQLSFGGSMRNRKMWTIIVSGLFLSSIIAGISGAFLIIEGELTTLLWEVLPAQMKWPILYYFVLCVLGALVLSYLKKRFGQIPQTAHEALTELKAKQSVDYSGVFRNLLAALVILIFGAGVGPEAALLGAIISLSVWQSDKLRYLYFHYDEQEQQVFWTKIQRLLHPQQFVQRYDTMLAPVDKKKLKQVMNGLFIVNGLVVFTFLMKLVGHPSFITKLGTGKIEMASLWLILPALLTAFVIGNAYQWLQAALAKLCQPFEEKQSILVTFGAACIFLFVILMPRLLFSGQSFMHLVPSFGSQQAWYILVIAAIMKLVFLQVCLQTGWIGGDIFPVVFSAILIGFAVAQFFPTIDSLFVVAIFATSLTTQILGTILVPGIFVGLFFPITLWPIVVLVLFLQWLLKNKIIKSN

SEQ ID NO: 5789 - protein, 62 aa, Enterococcus faecalis
ITRSSLVSVSFYLQERASYRSAEQTVADVASAGFLSKILAVLARHNENKGTVTYQIARLTTK

SEQ ID NO: 5790 - protein, 552 aa, Enterococcus faecalis
MMLKVSDLLTLEELPGITLVAGHKNQDQPILKVNILENPDILDWLTAGELLLTTGYIFKDDRKLQKNFLKELAKHHCAALGFKTQRYFEEVPPDLIKLADEMNVPILAIPYNYTFSQIADVLKSRVTLEQFDMNAQETALHNKIYQILETGSSSFHLLQDLAETIQNPVLLLNDHFEGVNFFDLPKNPIRISSILEDRQETSEFQKQLLEQSHPLLRFYQEPIHLQLKLQNQVVPIEIYPIKKKNVILYYLLVWNTLAPLRPVDVAHFKITAHYLLLQLQLEYSRKFEEYQQRNELFFKLFAHEKRDQAVFQQFQQYYRLAIDKPYAILLISLTLNERQRQERMSILGNQLNQVILGDKQKIVCIEIDSSFVLLVENPPEKEGDYLKMMQRLAQSSINQLMKVQEDVELFLTIGPKIQGLTQIHESYQQAIDVLAFQRQFVAEKPEMRIASYSNFHFRQTLQRYFLEEGQATLRKKYLQPLQKSDQQQHTDFVHTLNVYFQSKRNLSQTAKKLFIHRNTLLQRLEKIEQLVLLDFDKEVDLLALEVALFVGT

SEQ ID NO: 5791 - protein, 300 aa, Enterococcus faecalis
SRESAIKKEVVGMTKILAYDQTILSKLPHQTLTSLQCFTHAINYGHVDTQEILLTISTHPEHIAPNTIILDEKKLSHFADLPVQIEPLFIRLGRRQLTLADAQIWQPTPLYLTPSKTKIAIFLTYIQQTRFNPWQALFPASSSTFLFDSYSRTQIQKEMIHFQQAWEQKSFKIALDCLTKILGLGIGLTPTGDDFITGLLASFSALQQLPSNFQQLAVLAKERTNAVSYAEIHEAVNERFSQLVQRVFLSIESGNTNEMAQAVSALEEVGSTSGSDILCGIIFGLKLFCEENNHDNSNSN

SEQ ID NO: 5792 - protein, 105 aa, Enterococcus faecalis
NYFVRRIIMTIQTVIKENAYFDSVTLMTISTRANELAGVKTAMIGMGTDMNLEVIRNVGLYTPALDHVTTGDLLIVLDLDDQANSEEILQQVARVIYEEKENRFF

SEQ ID NO: 5793 - protein, 135 aa, Enterococcus faecalis
  MISC_FEATURE (121)..(134): Amino acids 121, 131 & 134 are Xaa wherein Xaa = any amino acid.
ILMTKRTQKKFYSKSHELFTKKKKTASSEVTYKTLDSALHEEPDANLVVISVNGKFAAREAHKALDQQKHVMLFSDNVTVDEELALKQKAHEKELFVMGPDCGTAIINGVGLCFANEVRSXDMELSAPLVXAAXN

SEQ ID NO: 5794 - protein, 313 aa, Enterococcus faecalis
  MISC_FEATURE (3)..(3): Amino acid 3 is Xaa wherein Xaa = any amino acid.
CPXPYIWLWDFTIIGTGGRDLSAEIGGLMMLDGLDTLMVDEQTKAILLISKPPAPEVTEKILKKLAVSTKPVVIYFIGSEQTERKIDNVTFATSSLDAVQKVIQFSQTQEAETSLYQNPTGATLTAIQQQQAPSQKFVRGLFCGGTLCDELLYALTEVSDDVYSNIHKISERQLANPDHSQAHTLIDFGDDRFTEGRPHPMIDPTSRITRILQEAKDPEVAVLALDFELGYGSHENPVGVLAEALKEAKAIAKADGRELAIIGYVLGTEEDPQDIHEQRKILEDLEVLVVDSSHQLCEATKTFVKGANEHEQK

SEQ ID NO: 5795 - protein, 274 aa, Enterococcus faecalis
KERTNMSRNDLFKQPLDTINVGIDFIHEDMKKQGIPSHQVNWAPPANGDPELLKLLDQLKNPTLYEKIQQANEEAVTRIIQSKPILVGFDKAINVMPDMTETTILHAGPPITYENMCGPMKGAVQGALVFEGLAKDLADADRVARSGAITFSPCHEHDAVGSMAGVTSPNMYVHIIKNETYGNTAFTNLSEQLAKVLRFGANDQSVVDRLIWMRDVLGPLLHDAMTFCPEGIDLRLMLSQALHMGDECHNRNVAGSTLLVQALTPYMVQTDFFS

SEQ ID NO: 5796 - protein, 216 aa, Enterococcus faecalis
HLTWFKLIFSREQLKEVFEFLGSSDYFSGPTWMGAAKCALDAGHNVENSTIVTTMCRNGVEFGIRVSGIGGNHWFTGPAQRVIGPMFAGYTQEDAGLDMGDSAITETYGVGGFAMAAAPAIVPLVGGTVAEALNYSKEMLEITTKENPNVTIPVLDFMGIPTGIDVLKVLETGMLPVINTAIAHKEPGIGMIGAGLTNPPANVFNEALKALVATIN

SEQ ID NO: 5797 - protein, 407 aa, Enterococcus faecalis
FQKLSKMSFFWSDHMKNKLINYEAVLALVVKIFLGMFLYWIMNDFRHVSNFFPYNDVVTKVNQQGFYKFIYFVMNFTEGEFYGGLFTTLFLLIGGLIAWQLYRKNSKWQGFAIAGGSGAWPWVLASQLLSLFLTIYVFDFTRFFTKEVLWLPTFIVVVGTPPALTLVYGPGWKKLGTISLLSALFTFPFANWLNAQLMPLLNVPGTVSNVTTMAFVGWIVSAICHQLPWMVPSVAPIAQKRQKQPKIENTQTFQWSIRRTFADFSEAWFYGNELVGGLVILGVLTDWFVNINHITNGSGLVPDILMRQMIASAVGVFLYRKHFAEKGWYPTFMPLVSIVPGVILMTGGGFWLSLAIAVLAGISAAPVGNYIAKRLPPFVPGAVGFVSGMAVVTILLSAVLHTFDIFV

SEQ ID NO: 5798 - protein, 93 aa, Enterococcus faecalis
QLFQQTNLPKQIFFRYQHVLTWSTWQNFLLLKNTDKKGIGQLKKEANRHSLLFIHYTKISNVCKTADNKMVTTAIPDTKPTAPGTNGGNRLAI

SEQ ID NO: 5799 - protein, 61 aa, Enterococcus faecalis
PRKSKRQSEPFFRIYSIFAVNYPPTGPLKPIAVVFGYAIRGMRKPMSFGHYFYLNPLVFSY

SEQ ID NO: 5800 - protein, 221 aa, Enterococcus faecalis
KSYYLRKELVTTSFLSTSGVSYETLKRHIKKMNQALRDFHLTIQLTTMTIQLIGAESNIRIFYHRLLVPFTHNNYFFDDYSIHEEHYFQFLKQVYSSELTVETEEIFGACWFFINTIRNKANCRVSQFSFDSKDVLFQLYQPSLAKLYASEGIYLQGEESFFAFFCFLESWNYDNVYGETLASALHTHYSQLRKSLQQFVTNLSTEEARPDLIQTNLLDNL

SEQ ID NO: 5801 - protein, 99 aa, Enterococcus faecalis
LRISRWELEFPPFYRVKTRNKYKEVLCVAKEDMIEVEGTVVETLPNAMFKVELENGHQVLATVSGKIRMHYIRILPGDKVTVELSPYDLTRGRITYRFK

SEQ ID NO: 5802 - protein, 240 aa, Enterococcus faecalis
GFTSAPFSHMASFISRSLKLGGEYMNLILMGLPGAGKGTQAEKIIDTYGIPHISTGDMFRAAMKNETALGLEAKSYIDKGELVPDEVTNGIVKERLAEPDTDKGFLLDGFPRTLDQAKALDTMLKELNKKIDAVIDIHVEEDVLIERLAGRFICRTCGATYHKLFNPPKVEGTCDRCGGHEFYQREDDKPETVKNRLAVNIESSAPILAFYKEQGLMHTIDGNREIDTVFSDVKKIIDEN

SEQ ID NO: 5803 - protein, 432 aa, Enterococcus faecalis
LFKLLKNAFKVKDIRSKILFTVLILFVFRLGAHITVPGVNAKGLSDLSSLPFLNMLNMVSGSAMQNFSIFSMGVSPYITASIIIQLLQMDIVPRFVEWSKQGEVGRKKLNQATRYLTIVLGVAQSMGITAGFNSLSQTGIVNNPTLGTFVMIAVILTAGTMFVTWMGEQITEKGIGNGVSMIIFAGIISRLPGAVKEIYEDYFVNIESSRIWQSVIFIAILVIAILVIVTVVTFFQQAERKIPIQYTKRVSGAPTSSYLPLKVNAAGVIPVIFASSLIATPNAILQAFSSKFAGENWYDIMTKIFSYNTVPGAIIYTVLIVAFTFFYAFVQVNPEKLAENLQKQGSYIPSVRPGKGTEEYVSGVLMRLSVVGSIFLGLVALLPIIAQMVWNLPQSIGLGGTSLLIVIGVALETTKQLEGLMMKRQYVGFINK

SEQ ID NO: 5804 - protein, 151 aa, Enterococcus faecalis
GGAKPMKLHELKPAEGSRQVRNRVGRGTSSGNGKTAGRGQKGQKARSGGGVRLGFEGGQTPLFRRLPKRGFTNINRKDYAVVNLDTLNRFEDGTEVTPVVLKEAGIVKNEKAGIKVLADGELTKKLTVKAAKFSKSAQEAIEAAGGSIEVI

SEQ ID NO: 5805 - protein, 72 aa, Enterococcus faecalis
ICRRNYRLRRTKIMAELKITLKRSVIGRPQNQRATVKALGLGKVNSTVTKPANEAIKGMVNTISHLVDVEEV

SEQ ID NO: 5806 - protein, 179 aa, Enterococcus faecalis
KWTRILGEGGTPFMVYIDPKHLELEDRVVAINRVTKVVKGGRRLRFAALVVVGDKNGHVGFGTGKAQEVPEAIRKAIEDAKKNLVEVPMVGSTIPHEVIGVFGGGRILMKPAVEGSGVAAGGPVRAVLELAGVADITSKSLGSNTPINVVRATVEGLKQLKRAEEVAALRGKSVEEIIG

SEQ ID NO: 5807 - protein, 124 aa, Enterococcus faecalis
IKEVKIVITKPDKNKTRQKRHRRVRNKISGTAECPRLNIFRSNKNIYAQVIDDVAGVTLASASALDKEISGGTKTETAAAVGKLVAERAAEKGIKKVVFDRGGYLYHGRVQALAEAARENGLEF

SEQ ID NO: 5808 - protein, 178 aa, Enterococcus faecalis
VSRIGNKVVVLPAGVEIKQDGNNITVKGPKGELTREFSSDIKMNIEGNEVTFIRPNDSKEMKTIHGTTRANFNNMVVGVSEGFQKALELIGVGYRAQVQGNKLTLNVGYSHPVEMTAPEGVTFEVPANTQVIVKGINKEVVGELAANIRGVRPPEPYKGKGIRYVGEFVRRKEGKTGK

SEQ ID NO: 5809 - protein, 141 aa, Enterococcus faecalis
TRIKEVNSSMVMTDPIADFLTRIRNANMVKHETLEVPASKIKRDIAEILKREGFIRDVEYIEDDKQGVIRVFLKYGKNEERVITNLKRISKPGLRAYVKADEVPKVLNGLGIAIISTSEGVITDKEARAKNIGGEVIAYVW

SEQ ID NO: 5810 - protein, 67 aa, Enterococcus faecalis
YKEANYVAKKSMIAKNKRPAKHSTQAYTRCERCGRPHSVYRKFHLCRICFRELAYKGQIPGVKKASW

SEQ ID NO: 5811 - protein, 179 aa, Enterococcus faecalis
MNRLKEKYIKEVTPSLVEKFNYSSVMQTPKVDKIVINMGVGDAVSNAKNLDKAVEELALITGQKPLITKAKKSIAGFRLREGMPIGAKVTLRGERMYEFLDKLVTVSLPRVRDFHGVSKKAFDGRGNYTLGIKEQLIFPEVDYDLVDKVRGMDIVIVTTANTDEESRELLAQLGMPFQK

SEQ ID NO: 5812 - protein, 109 aa, Enterococcus faecalis
RRCETVMFVKKGDKVKVITGKDKNKEGVVLAAFPKQDKVIVEGVNVVKKHQKPNQAAPQGGILEVEAPIHVSNVMVIDPSNGEATKVAFKEVDGKKVRVSKKTGEVLDK

SEQ ID NO: 5813 - protein, 132 aa, Enterococcus faecalis
STKSERGIHIVIQQESRLRVADNSGAREILTIKVLGGSGRKTANIGDVIVATVKQATPGGVVKKGEVVKAVIVRTKSGARRADGSYIKFDENAAVIIRDDKSPRGTRIFGPVARELRENNFMKIVSLAPEVL

SEQ ID NO: 5814 - protein, 97 aa, Enterococcus faecalis
LIVEGGQTRMTEERNQRKVYQGRVVSDKMDKTITVVVETKKNHPIYGKRMKYSKKYKAHDENNTAKVGDIVKIMETRPLSATKRFRLLEVVEEAVII

SEQ ID NO: 5815 - protein, 71 aa, Enterococcus faecalis
NVRKWVVNRMKVKEIRELTTAEMLDKEKQLKEELFNLRFQLATGQLENTARIKEVRQSIARIKTVLREQAN

SEQ ID NO: 5816 - protein, 150 aa, Enterococcus faecalis
ERREIIMLVPKRVKHRREFRGKMRGEAKGGKEVAFGEWGLQATESHWITNRQIEAARIAMTRYMKRGGKVWIKIFPHKSYTSKAIGVRMGKGKGAPEGWVSPVKRGKIMFEIAGVPEEVAREALRLASHKLPVKTKIVKREEMGGESNEG

SEQ ID NO: 5817 - protein, 223 aa, Enterococcus faecalis
EEGQSVGQKVHPIGMRVGIIRDWDAKWYAEKEYAEFLHEDLRIRKFIATKLADAAVSTIEIERAANRVNISIHTAKPGMVIGKGGSEVENLRKELNKLTGKRVHINIVEIKKPDLDAKLVGEGIARQLENRVAFRRAQKQAIQRAMRAGAKGIKTQVSGRLNGADIARSEGYSEGTVPLHTLRADIDYAWEEADTTYGKLGVKVWIYRGEILPTKKNTEKGGK

SEQ ID NO: 5818 - protein, 63 aa, Enterococcus faecalis
KSFNVRQLLTHKKNLDLDVESLVVSEAFVNEGPTMKRFRPRAKGSASPINKRTSHITVVVTEK

SEQ ID NO: 5819 - protein, 103 aa, Enterococcus faecalis
PCVVHFERRFTMGRSLKKGPFVDDHLMKKVEAQQGAEKKKVIKTWSRRSTIFPSFVGFTIAVYDGRKHVPVYIQEDMVGHKLGEFAPTRTYRGHVADDKKTKR

SEQ ID NO: 5820 - protein, 277 aa, Enterococcus faecalis
GVAIKKYKATTNGRRNMTSSDFAEITTSTPEKSLLQPLKNNAGRNNNGRITVRHQGGGHKRQYRVIDFKRNKDNVAAVVKTIEYDPNRSANIALVHYEDGVKAYILAPKGLEVGMRLVSGPEADIKVGNALPLENIPVGTVIHNIEMKPGKGGQLIRSAGTSAQVLGKEGKYVLIRLNSGEVRMILATCRATIGSVGNEQHELINIGKAGRSRWMRKRPTVRGSVMNPNDHPHGGGEGKTPIGRKAPVSPWGQPAIGYKTRNKKAKSDKLIVRRRTK

SEQ ID NO: 5821 - protein, 133 aa, Enterococcus faecalis
SLGFITLPRTVGRLRIQRERPALPMLINSCCSLPTEPIVARQVAKIIRTSPEFKRINTYLPSLPSTCALVPAERINCPPLPGFISMLWITVPTGMFSNGNALPTLISASGPDTRRMPTSNPFGAKMYALTPSS

SEQ ID NO: 5822 - protein, 496 aa, Enterococcus faecalis
GGLRQLKDSPMIQLMSAAPFMFLPILVGISAAKRFGANQFLGAAIGMIMTTPDLGGATEYWNIFGYHVAQTNYAYQVIPVLASVYLLSILEKYFHKKLPSSIDFTFTPLLSVIITGFLTFTVIGPTMLLLSNGITDAIVWLYNATGFIGMGIFGGTYSLIVMTGLHQSFPAIETQLLSAWTNGIGHGDFIFVVASMANVAQGAATFAIWFLTKNSKTKSLASSAGLSALLGITEPALFGVNLKYRFPFFCALIGSGIAAAITGLLKVVAVSLGSAGFLGFLSINATSIPFYLLCELISFSVTFAITYFYGRTRSSSIFAAEAIAEQTSVDTSEINTNQIANADEPTTVETIVSPLAGEITTLGSVNDPVFSSESIGKGIAIKPNGNTIYSPVDGIVQVVFETGHAYDLKSNTGAEILIHVGIDTVSLNGKGFTKKVGAKQKVKKGEVLGTFDSTVITNSGLDDTTMVIVTNSKDYSEVIPITKNIVTEGAALLTIK

SEQ ID NO: 5823 - protein, 70 aa, Enterococcus faecalis
RPVITMSEYVPPKIPIPMNPVALYNQTIASVIPLDSNNIVGPITVKVKNPVIITDNNGVNVKSIDEGSFL

SEQ ID NO: 5824 - protein, 89 aa, Enterococcus faecalis
KGIEVALIERNPRNPAEPSDTATTLSRPVIAAAIPEPIRAQKNGKRYFKFTPNNAGSVIPRSADNPAEEARLFVLEFLVKNQIANVAAP

SEQ ID NO: 5825 - protein, 89 aa, Enterococcus faecalis
MKYKVVYMPQAQKQLKKMDRNQARIIVAWIRKNLEGTTDPRQHGKGLTGNRSGEWRYRIGNYRILANICDSEIIIQIFSIGHRSTIYKK

SEQ ID NO: 5826 - protein, 115 aa, Enterococcus faecalis
FMFYSIYWSNHHIYNNIVLTKSLVFNTMLLQSANGGNKMSQSTITFRIPEDEKELVLEYAKAHNSSLTELYRKAVLDKIEDEIDLKTLRNAIEISKEKKEIGISQEEMENLLNEI

SEQ ID NO: 5827 - protein, 400 aa, Enterococcus faecalis
RQKHTQEDFYMTQVHFTLKSEEIQSIIEYSVKDDVSKNILTTVFNQLMENQRTEYIQAKEYERTENRQSQRNGYYERSFTTRVGTLELKVPRTRDGHFSPTVFERYQRNEKALMASMLEMYVSGVSTRKVSKIVEELCGKSVSKSFVSSLTEQLEPMVNEWQNRLLSEKNYPYLMTDVLYIKVREENRVLSKSCHIAIGITKDGDREIIGFMIQSGESEETWTTFFEYLKERGLQGTELVISDAHKGLVSAIRKSFTNVSWQRCQVHFLRNIFTTIPKKNSKSFREAVKGIFKFTDINLAREAKNRLIHDYIDQPKYSKACASLDDGFEDAFQYTVQGNSHNRLKSTNLIERLNQEVRRREKIIRIFPNQTSANRLIGAVLMDLHDEWIYSSRKYINFDK

SEQ ID NO: 5828 - protein, 604 aa, Enterococcus faecalis
VEMVKTLYSILHRSLDLTWDLVNFCSFQFFLNVVAYIATLSISLTIGLNLLVPFYLIYTKSSQFNPKGYFINLMTFTFCQFLPIKMTFIQQSKAFLAGLLLFLIAVKFYSFVSQYYAKRTSEKNEFSFFADLLNSYGNEQEYQANLNKLAKLTQQLYFQAYLSSSSKNKITPKTRIAFNYAFLSQRALYFFTNIDKLVKPDSIIEKWMTRISDFFEKSSQFTTMSVIEKNELRIQGKILIISLEHSDEVALILLRHLLIHSLFILRLLDNDPEISNNHWSTPLHHQTKYLFQHKFRIDSFELRVALRFSIVLAFCFSLCTLTHITRGTWLPMNAFLLLQPMNEETTYRLKTRFLGTIFGCLISIYTVQLFSNNLLHLILASLLGICAFTIIPGTTFQATLSTIFALFLSSLVMSNLMAAGLRFVYVLLACSLVFLVNQFILPTGIKNQFRFNLQELFHIHQTSLIFLQNSFHHKIDYGTIADLQMNYHLLHGEIKNYFGKSDKLKQISYKEFLSISWQMITIVEQLLLLIDSKKITENDITVIENTIDSLCYVLSLIQNLLDCNLKTLKIPEVLFKRDLAIDPEIAYLLFQYSKKLSAMYRLVL

SEQ ID NO: 5829 - protein, 80 aa, Enterococcus faecalis
FTFSKSILYSFICSANINDCRDSLYIRIFLFSLKEFLLYLMITTYNYRSTSDNNKSIRIGNSHSLAMTSHFFAFCNIKTY

SEQ ID NO: 5830 - protein, 307 aa, Enterococcus faecalis
KRGQMMKIKIERNKKKISGKKKEQVVSMGKHRKMVLVLWLLLLSSLSFGIYKNFTAIDQHTTHEKVVVKEKIVNTSGVENFTVDFAKEYFSWKNDRVAIEKRIRSLGHYLTKDVLDLSQDMVRADIPTSSKVNSVKILNVEKKSKWFVVSFLVDQEIVEEKKALQEKTAYRISVFEDRLGNCIVTSLPTMISKPVKANYKTKQFTDDSMIKEKNKEEIEEFLEVLFKLYPTASKEELGYYVKKDVLEPIYKNLKFVEISSINYQKKGQAIKTNILVKYLDPTSKITSKFQYVLILQKAKKWEVIANE

SEQ ID NO: 5831 - protein, 264 aa, Enterococcus faecalis
QLFQVESAVPMEDVMQSSESAGIPPNSLSTEASIKQGCIYFASLVNRAKDIGCDQESIIQSYNYGGGYLDYVGKNGKKYSFALAESFSKEKSDGEKVTYSNPIAIKENGGWRYNYGNMFYVMLVKQYLTTTKFDDKTVQGIFDEAFKYEGTAYVFGGSSPATGFDCSGLTQWCYAKVGLQLPRVAQDQYDAMSHIELKDAKPGDLIFFHSTYDAGTYVTHVGIYAGDNRMFHAGDPVGWTNLTETYWQQHIIGAGRYKNRKGDR

SEQ ID NO: 5832 - protein, 96 aa, Enterococcus faecalis
YGMTIKKLSTVLLVLLTVLFMGILICVGLLFGDDSEGKASTGLSSGGSNVSLGVLKHRPLVEKYAKDSDILEYVPIFLTIISGRVCGTDGRCDAKF

SEQ ID NO: 5833 - protein, 717 aa, Enterococcus faecalis
YSPTGSRENGVKEMKRKILRIVGIVLTSLFFLIILLSLVGKVAEATGLVDDTVKAGNLYSQYSLGNYQLDFFVDNSWDWLPWNWGDGLGKSVMYGLYAITNFIWTVSLYLSNATGYVVQEAYKLDFISDTAESIGKNIQTLAGINENGLQPSGFYFGFLMLMILVLGIYVVYTGLLKRETTKAVRAVINFVAIFLLSGSFIAYAPNYITKINDFSSDISESALSLGTKIVVPNSESHGKDSVDLIRDSLFSIQVQQPWLLLQFDDSNVEEIGEERVNKILSVSPDENKGKDREEAVKAEIEDNENANLSITKTMSRLGTVVFLVLFNIGISFFVFLLTGIMLFSQILFIIFAMFLPISFLLSMLPTYESLGKKAIVRLFNTIMMRAGVTLVITTAFSISTMFFNISATYPFFMVAFLQIVTFAGIYFKLGDIMSMFNLQSNDSQSMSRRVMRKPQMLMNRKFRQLNRNVGRALAFDGGVAVAGKLATDSTKENRGSKSKRLSNRRNQSIQSNHEQNTDPKKQEKTTNSRTTRLNLMGRKAGKAMDSKSIVKDKVKQAKDHVIDTPTNLKYNLHRGIEKAKNAPGEFKRGLVQEKKEREEQRKANHQQRQKRMDEKRQVLGNRRTSFLKRRTNVSANTFPNSKDHSSLSQRQVAKDFHNVSVLQNRQKDSLQTIYPKIAPKMMSIKKMKNQSTLTKNGKKQYQKNSINREKVKTGDMA

SEQ ID NO: 5834 - protein, 111 aa, Enterococcus faecalis
RLPAFTVSSTNPVASATFPTKLKRMMRKNRLVKTMPTIRKIFLFISFTPFSLEPVGEYQRHGRVLQRPGEPEPHLPDHTNPASSIGRFPNLVGVFDYFHLLDPTQKIPKSS

SEQ ID NO: 5835 - protein, 82 aa, Enterococcus faecalis
RIISGLKFAFRSTDIHEIKKTLEFFGLDQEDESNQKRLRDLENGQCLMQDLYGRVGVVQVHPVFEELFHAFDTRPPVQERME

SEQ ID NO: 5836 - protein, 424 aa, Enterococcus faecalis
GLLNKFGSQRHMTAIRKGLIATMPLTIVGSFFTIFQNIPIEAYTKLIEPYQAILDIPSRYTMGLLALYATFGIASSLAKSYKLDSLTCGILALMAFLVTAAPPTRVFEDVDNVITAGRYINLANLGSASLFGAIVTALLSVEIYRFFIEKDIMIKMPDGVPPEVSNSFIALIPGAVILLLFWVIRHVIGFDLNGFLSTLLMPLKGILAGNSLFGGLLTVFLICFFWVLGIHGPAIMGPVIRPFWDMSIAENLEAFTNGANVHQLPNIFTEQFLQWFIWIGGAGTTLSLVVLMMFSKSTYLKSLGRLSFLPGLFNINEPVIFGTPIVMNPILGIPFIVAPLITTTLSYFLTVANIIPMMAARLAFAIPAPIAAWMSTNWSFSAAVLVIVNFLITMAIYYPFFKVYEKQQLDKEAEELAAEQAAKN

SEQ ID NO: 5837 - protein, 368 aa, Enterococcus faecalis
RSVRTKMKRALGVSVYPDHSDINQDKAYLKKASECGFTRIFMSMLEVTDGKEAVQKKFKELISYAKNLGFETILDVVPSIFDELEISYDDLTFFSELGADGIRLDTGFDGNKEAMLTFNPFGVAIELNMSNDVAYLDNILTYEANRPFLYGCHNFYPQAGTALPYDFFEKCSIRFKKEGIRTAAFISSQVGEIGPWDVNDGLPTLEMHKQLPVTVQAKHLFATNLIDDVVIGNAYASNEELEALGQLNRYQTELTIVFEEATSEIEKEIVTKNQHFRRGDITQQMIRSTEVRKKYKNEVNPPHDNQAMLQPGDVVVGNDAFGKYKNELQVVLEPHQDSRKNRVGRIIEEELVLLEFIKPWTKFRFIEK

SEQ ID NO: 5838 - protein, 354 aa, Enterococcus faecalis
IYRKVGKNMDYDLLIKNGQTVDGMPVEIAIKEKKIAAVAATISGSAKETIHLEPGTYVSAGWIDDHVHCFEKMALYYDYPDEIGVKKGVTTVIDAGTTGAENIHEFYDLAQQAKTNVFGLVNISKWGIVAQDELADLSKVQASLVKKAIQELPDFVVGIKARMSRTVIGDNGITPLELAKQIQQENQEIPLMVHIGSAPPHLDEILALMEKGDVLTHCFNGKENGILDQATDKIKDFAWQAYNKGVVFDIGHGTDSFNFHVAETALREGMKAASISTDIYIRNRENGPVYDLATTMEKLRVVGYDWPEIIEKVTKAPAENFHFTQKGTLEIGKDADLTIFTIQAEEKTLTDSNG

SEQ ID NO: 5839 - protein, 384 aa, Enterococcus faecalis
PKSKFAQSKQLLEDKSMTISYEKFHLKEVINASGKMTILGVSKVSEAVLAAQRFGGEHFFEMSELSVQTGAFLANLLKVEDAQIVSSASAGIAQSVAALIGKGSLYHAYHPYTEKIEQREIVLPKGHNVDYGTPVEVMVAQGGGQVVEAGYANMCSPEHVEMMISEKTAAILYIKSHHTVQKSMLTVAEAAKVAQRHKVPLIVDAAAEEDLFKYTEAGADLVIYSGAKAIEGPSAGLVVGKKEYIDWVRLQGKGIGRAMKIGKDNILGFTQAVEEYLAHGSESGASMQERLKPFVEAINNLSDLTAKIVQDGAGRDIYRASVKVDGRKTAKEVIQALKAESPAIYTREYQANNGIIEFDIRSVNQEEMNKIVQRLQEIMDKKEK

SEQ ID NO: 5840 - protein, 248 aa, Enterococcus faecalis
VMSLKPNYLEERICLNVLANSVENAQACYEAAEGHVVLGVLSKNYETDEAAIDDMKKYQAATNNALSVGLGAGDPNQSQMVARLSEVLQPQHVNQVFTGVGASRALLRQDETVINGLVSPTGKVGYVNIATGPLSSGAPAAEVPIETAIKLLKDMGGSSIKYFPMKGLAHKEEYQAVAAACAKYDFYLEPTGGIDLENFEEIVQIAVDAGVKKIIPHVYSSIIDQETGDTRTEDVKTLLTMMKNTLNK

SEQ ID NO: 5841 - protein, 339 aa, Enterococcus faecalis
VAKMKIAAFGEVMLRFTPPEYLMLEQTEQLRMNFVGTGVNLLANLAHFQLETALITKLPANRLGEAGKAALRKLGISDQWVGEKGDHIGSFFAEMGYGIRPTQVTYQNRHQSAFGISEAKDYDFEAFLAEVDMVHICGISLSLTEKTRDAALILAQKAHAYQKKVCFDFNYRPSLNTANSALFMRQQYERILPYCDIVFGSRRDLVELLGFIPREDLEGEAQETELIQRFMSQYNLEWFAGTTRSHSQNQNYLSGYLYTQNEYQQSEKRPLLNLDRIGAGDAYAAGILYGYSQNWSLEKAVTFATVNGVLAHTIQGDIPLTTVKQVNHVLEHPNIDLIR

SEQ ID NO: 5842 - protein, 62 aa, Enterococcus faecalis
IHHFLKLLKDVQHSSCCLLCNLFLLIIMKKRPEEKPHTTFLLVFFFNELNQYSDAQERDSLV

SEQ ID NO: 5843 - protein, 353 aa, Enterococcus faecalis
LKETDCKGGSRMSVAHLLTVLENDEFIERIQKRPEAFIGTTGLVGLENLLVQTINGLLEFFIEKNQGKIAIQLSRQQISFQVSSTRPLVFEQKQVDLEPPFLYLSVLQAFSKQVGISIDQEKQRTIFIYHQGQLKKRLLLPIEETQERIEVLFWPDTQIFGTESLSYMRVLQQCQQIAMLNPGLKILLTQEEEQKNLCYYPKGLSNYLFEKDNPLTRKAAPIIQAKQTELALVQFILSKNHAPQVQKTFVNGHYPSLGGTHYEGFLDGVVAAFNQFLEEQHYSLSVTADSFLAEFDFVLAITIPKPRYTDATKTILRNTELYEVVKEVVFDELQHYFQRHPKWLEQGRIEGNE

SEQ ID NO: 5844 - protein, 148 aa, Enterococcus faecalis
MKIFVDGDGSPVKETVIEVAVEKALDVVIVTSVDHYSLKDYPENVSFVYVDKGADAADFKIVQLIKKGDLLITQDYGLASLVLPKGVLVLHQLGYQYTKENIDGLLEQRYFSGQIRRKGGRTKGPKPFTDQDRTTFKQALIELVKRSL

SEQ ID NO: 5845 - protein, 298 aa, Enterococcus faecalis
EDKHLKIILLYGGRSEEHDVSVLSAYSVLNAIYYKYYQVQLVFISKDGQWVKGPLLSERPQNKEVLHLTWAQTPEETGEFSGKRISPSEIYEEEAIVFPVLHGPNGEDGTIQGFMETINMPYVGAGVLASANAMDKIMTKYLLQTVGIPQVPFVPVLRSDWKGNPKEVFEKCEGSLIYPVFVKPANMGSSVGISKVENREELQEALEEAFRYDARAIVEQGIEAREIEVAILGNEDVRTTLPGEVVKDVAFYDYDAKYINYTIEMQIPAHVPEEVAHQAQEYAKTAYLMIGLGPRDGT

SEQ ID NO: 5846 - protein, 389 aa, Enterococcus faecalis
REEVGRMIIQSKNVWINEQFQPAQVEVSEQRIVAILPYNEKAVDKEYGEKRILPGFIDIHDHGWHGGDANHANHEFIKEWQAYLPEEGITAFLPTTSTTFPKDLEHSFEVIGSFIEEDQGTNGAQILGIHAEGPMISEEFRGSHNPELLVKPSVETFKKWQELAKGHIKLMTLAPENDVENALTTYCHEHDVVISIGHTAATYEQAMAAVEAGAKSFTHTFNGMEDISHRKPTAVVAALDSEETFAEIIADGVHVDYSLVRVLAKLKGKDYLIAVTDSIWAKGCQPGVYPKPEKGIEMVIDEQNVVRLANGKLAGSTNHLNNMVRNLVEKALLPEVIAINSVTKNPARLLNVNESMGEIKLGLLGNFTIIDEKYEVLETLVNGETVYKK

SEQ ID NO: 5847 - protein, 265 aa, Enterococcus faecalis
TKSNRRKKMLVQAILVGIWAGIAGVDKLVLQTHIHRPIVTGLIVGLILGDVNTGLITGATLELVWIGAVAIGGAQPPNVVIGGVIGTALAIITKSDPQVTVGLAVPFAVAAQALITLLYTAMSPIMHKFDVYAKKADTRGIERMSSFLPIVLFICYFFVVFLCIFFGADKASSFISILPEWSIHGLSVAGGMMPAVGFAMLLKTMWETSYVPFFIFGFVMAAYLGLDTLAVAGLAVAIALYEFYAQRNNTVTASNNNGGFEEDGI

SEQ ID NO: 5848 - protein, 300 aa, Enterococcus faecalis
LSQLLYMNFTHKEIIQSLHQIIMEGLKKMASEETYNDMISEKVITKKELKKIMFRSYLLQSSFNYERMQAGGWTYSLIPGLKKIHRDKEDLALSLENHLQFMNTNPQLVTFMHGVIIAMEESKESPKSIQAIKTALMGPLGGIGDALFYLTVLPIAAAIGSQLSLEGNILGPIVFLLLFNIPYMAAKIGLINLGYKMGVKAISVLSESTKKLSRSATIVGISVVGALIPKSVQLTTTFVFRLKDTKLDLQTQLFDTIMPNLLPLVFTLFCFIMLKKGRTPIALIIFTVIFGLLGSLIGII

SEQ ID NO: 5849 - protein, 94 aa, Enterococcus faecalis
KKLFIIQQVLNTTSSGRIKNNHSIKFRKRFGTIAILAIVPNLFYIIPIKEPNNPKITVKIIKAIGVRPFFNIIKQNSVNTKGNKLGMIVSNNCV

SEQ ID NO: 5850 - protein, 556 aa, Enterococcus faecalis
KGACQMKKSVLFTSLLVLSSLALAACGGGSDDKGASNGGSDNQVYTMVESQEMPSADPSLATDEVSFTTLNNVYEGIYRLDKDNKPAPAGAAEKATVSEDGLVYKVKLREESKWSDGKPVTAADYVYGWQRTVDPATASEYAYMFEPVKNAEKISKGELPKEELGIKAINDHELEITLETATPYFDDLLAFPSFLPQRQDIVERFGKDYTKSSDKAVYNGPFTLTEFDGPGTDTKWSLTKNEEYWDKETVKLDKVAINVVKEAPTALNLYETGEVDDTYLSGELAQQMQNSPDLVQLKAASSFYLEMNQADEKSPLTNANLRRAMSYAIDRDSLAKNILANGSLPSQGFVPVDVAKSPKTGEDFVKEAGSDKLVKYDKKKAVEYWNKAKQELGVSNLTVDLMVDDSEGAKKMGEYLQGSLSDTLEGLKVTVTPVPMAVRLDRTLKGDFQIAVRGWSADYSDPINFLDLLESSTSNNRGRYSNPEYDKFIAASKTTDVNDPEKRWEDLINAEKTVIADMGVVPIYQKAESHLRAPNVKEIIYHPTGAKYDFKWAYKE

SEQ ID NO: 5851 - protein, 147 aa, Enterococcus faecalis
KTFFISQRPLLYGKIRVILTKVIVSRNRPREVIQMNEENELTYFKGGLALGVGLGLVGGIASTLFYHKKKTISADLVLENVKAAFLKEGPIEGSWIEFEKKPLRKFAIHSKTYTGGICRIEDDGIVQYEFTADAYTGTIIDIQRLKD

SEQ ID NO: 5852 - protein, 375 aa, Enterococcus faecalis
RLVGVISNKSKAIGHTSMEEKTFQRIKELTELQGTSGFEDDIRAYMKEHITPLVDDVQYDGLGGIFGIKRSKVEAAPRVMVAAHMDEVGFMLTQINDNGLFQVVPLGGWNPYVVSAQRFTLKTSKGNYPCISSSIPPHLLRGTSGQKQLEVSDVLFDAGFSSKEEAESFGVRPGDSIVPQTETIKTANGKNIISKSWDNRYGCTLVLDALETLQNEELGHTLIAGANVQEEVGLRGSKPSVHKFNPDIFFAVDCSAADDIHTKKGTYGHLGEGTLLRIFDPGLITLPRLREYLLDTAATHNIPYQYFVSKGGTDAGAAHTTNNGVPSTVIGVCGRYIHTHQTMFSIADYEAAREMLLQALRGLDKSTVNTIVYGK

SEQ ID NO: 5853 - protein, 104 aa, Enterococcus faecalis
MIYPNSLEELATYVEKGKNVFFFTADWCGDCRFIKPVMPEIEEAFPAFQFIEVDRDQFIDVAAEWNIFGIPSFVVIENGQELGRLVNKDRKTKEEISAFLTSLG

SEQ ID NO: 5854 - protein, 166 aa, Enterococcus faecalis
SKKPFRSASIGKVTKMEEQMYKNILVGVDGSDQANLAYERAIEVARRNGSRVIVANILENQVYTMMGYSTLNDQLIDQETAAAEELMADCKKYAESVDFHNVETVTMYGSPKEVMSHELPEKYNVDLIMVGQSGLNAVERVVMGSVSSYIIRQAPCDVLIVHSEEK

SEQ ID NO: 5855 - protein, 205 aa, Enterococcus faecalis
ERLMTIYGVSRVTVRNAIKLLVDDNMLIKRHGKWTFVSMPSYVESMTAGGSFTESGLKMNRKPTTKIISICLKKATGHVAEALGVEKATEVIVIERLRSLDNMPAIFEIDYFRKEDQFMLDLELTDTSLLDILRQYRGVIASYFDNIIEIALADEKLAEALAISEEEALVKINQTVVDNDNQILYFNEQYILSESYKVAIRSYNK

SEQ ID NO: 5856 - protein, 142 aa, Enterococcus faecalis
IKEVYEMRRFYIASHGDFSKGIKHSLEMIAGHSAAAVHTYSLYPGESAVDFFGELKKKAEQAPEDEFILMGDLFGASVVTAMMGLTVLENVIVFSGVNLNLALELMLAGSEKLTDEKIQVIIRNARQGIQRVHIEEIENDDF

SEQ ID NO: 5857 - protein, 183 aa, Enterococcus faecalis
FLGGVLMKKKADFLELFAVEKPIIGVIHLKGKTDQEIQERAKKEIQIYSEHGVDAILMENYYGDYVQLEKALQYVTSLDLPIPIGVNVLNVDPLGFHLANKYHLQFLQIDSVVGHVKPRDEASLQAFFDLYRAKTTAKLIGGVRFKYQPMLSEKSVEEDLKIAQQRCDAIAVTENATGEETSL

SEQ ID NO: 5858 - protein, 69 aa, Enterococcus faecalis
KIKLFRKQLPEFPLIVAAGLNDKSVKEQLAICDAAIVGSNFKDTRKDTGDIYAPYVDSFMKIVKELRGE

SEQ ID NO: 5859 - protein, 159 aa, Enterococcus faecalis
IRMIKMTRVDHRLIHGQVGFTWTKFLEADCILIASNTLVEDPLRMSAMKMAKPSGVKLVMKTIDDSIKALNSGVTDKYKLFILCESVADMYQLVKEVPTIKEVNLGGMKNGETRKQISKAVHLSETDIAQIKELTNEGIELTVQLVPDDQKVAINKLLN

SEQ ID NO: 5860 - protein, 256 aa, Enterococcus faecalis
MEVTFIKVLLMFLIAFFAYMHSWFGSTMWNRPIVVAPLVGLALGDLDTGIKLGATLELVFMGAFPVGASNPPDFVSGTIIATAYVIMSGQSISSAVVLAVPIATLVLLIDNLQMTFLLTGASHLADKEAKRGNIQGVERIQLIAGVGNKVLLALIVALGFYLGVPFIEKVLSYVPDFITHGLDIAAGIIPAIGFAMLARMMVTKKMIPFLLLGFLFAAYLKISVVGIALFGIVIVLLYMNMSDGQTREAVVDDNEF

SEQ ID NO: 5861 - protein, 284 aa, Enterococcus faecalis
VMVKQGRLLSMTMNSKNTKSVITKKDFWSVFFRSLTLDASWNYERMQNLAYAYAMAPIIRRLYKNNEEKKAALERHLEFMSVTPHISTLLLGISGAMEEENAKNHEFNSASINAVKTSLMGPMSGIGDSFFWGTLKVIATGVAISLSKQGNIFGPIAFLLIINIPHFALRYICLDKGFKLGAKFFSDVEDSGVIEKVTTAASILGLMVIGGMTASNVVFELTAKVGSGKIATPLQEYIDQIMLGFFPALFFLVIYWLLGKKVKTTTLLVGVILLSIFLAALGIA

SEQ ID NO: 5862 - protein, 86 aa, Enterococcus faecalis
LSNLGGTEMIFAYNKEHVGDVLLVIVADDQGAENQVKRVGDVARVSLVEAPETVVAWNIFNASALLGDINGTGHSDFNRRTNRKCA

SEQ ID NO: 5863 - protein, 186 aa, Enterococcus faecalis
IGQHYQHETEIVYVDTDNQLLGKQATEFLIENAHKNILFVTNTTHESLYYERYFGHQKAMMMQGLTVLPSVALEKPEDYMAFDDILHQNNATALVVIDDIFALRTMQLAQIYGYQVPETLSIISFNNSIFSTLTHPYLTSIDIDTSELGRMAMKKLYELIHEELTNGVRLVIPHKLIKRETVIPIH

SEQ ID NO: 5864 - protein, 451 aa, Enterococcus faecalis
YPPQGKGAISIVRLSGEQAVAIANKVYRSGTKDLAKVPTHTIHYGHIVDPQNDQLIDEVMLSVMRAPKTFTREDVVEINCHGGIVVVNQLLQLLLREGARMAEPGEFTKRAFLNGRMDLSQAEAVMDLIRAKTDKAMNVALNQLDGNLSTLIRSLRQEILNTLAQVEVNIDYPEYDDVEELTTKLLLEKAEFVKAQIQQLLTTAKQGKILREGLSTAIIGRPNVGKSSLLNHLLREEKAIVTDIAGTTRDVIEEYVNVRGVPLKLIDTAGIRETEDIVERIGVERSRKALADSDLILLVLNQSEELTEEDRQLLEATKGLKRVILLNKMDLPTKLDPNELQELVPAEEILSVSVLSNTGLDQLEAKIADLFFGGQTGEKDATYISNTRHIALLDQAALSLQEVINGIEAGMPVDLVQIDMTRCWDYLGEIVGDSVQDELITQLFSQFCLGK

SEQ ID NO: 5865 - protein, 641 aa, Enterococcus faecalis
ENKTREEFFMNQYQAESYDVIVVGAGHAGSEAALAAARMGVKTLLLTINLDMVAFMPCNPSVGGPAKGVVVREIDALGGEMGKNIDKTYIQMRMLNTGKGPAVRALRAQADKHAYATEMKHTIEKEENLTLRQGIVEELIVEDGVCRGVVTSTGAAYRSQAVVITAGTALRGEIIIGELKYSSGPNNSQPSVGLANHLKELGLEIDRFKTGTPPRVKSSTIDYSVTEEQPGDKEPNHFSYSTPDSAYNQNQEPCWLTYTNETTHEIIQKNLHRAPMFTGIVEGVGARYCPSIEDKIVRFADKPRHQLFLEPEGLNTEEVYVQGLSTSLPEDVQTEMLHSIEGLEKVEMMRTGYAIEYDVVVPHQLRPTLETKVIENLYTAGQTNGTSGYEEAAGQGLMAGINAALKIQGKEPLVLKRSDGYIGVMIDDLVTKGTNEPYRLLTSRAEYRLILRHDNADLRLTEMGHEIGLVKEEQYAAYLVKKAAVEAEIARLGKHRIKPTKEVQAFLETKGAAGLKDGILARDFLKRPEISYQEVAQFIPAPEEALDPKVIEQVEIQIKYEGYIKKAMEKVEKLKRMEAKRIPENIDYQAINGLATEAKQKLQKIQPETIAQASRISGVNPADISILMVYIEQGKIAKVQG

SEQ ID NO: 5866 - protein, 276 aa, Enterococcus faecalis
KRKQMIGVEQMTDWLGIKGKVVIVTGGSSGIGHSIVESLLAQEVYVANFDISASETQHEHLLFVKVDVTSRAEVEAGVAQVVEKFGTVDGLVNNAGINIPRLLVDKNHPHGPYELSDEVFDKIVAINQKGLYLMSQAVGRILVQKQAGVIINMSSEAGLEGSEGQSAYAATKAAVSSYTRSWAKELGKSNVRVVGIAPGIMEETGLRTLAYEEALAYTRNISVEQLRAGYSKTSTIPLGRSGKLHEVADLVCYYLSDRSSYITGITTNVAGGKTRG

SEQ ID NO: 5867 - protein, 620 aa, Enterococcus faecalis
MTLVNRWYQVIKLLVDHKGMSLQELQEKLAASPQTVRKNIDTLNDELIGIAQIIQKENLFQLEINNFEGFEEVLSGRLKRESDFNSSSKRVSYIIKRLIEEDQFISTYDLSEELAVSRGTVNKDIKRMKELIAPWQVAVVGTPNRGIHLEGKEFDLRLLHVNYVQEYFEEQFLHETTKQMIQKIIKETRLAKQDSFLLRRVVSIVLQRVLAGKLITELPPEYVDYVRHNEQIEELMYHLEITYNVTLSQWERSFISFPFNINTNHIRNSLLADEGLLADYFQKMMKKIHHSVVVEFDEDFLFSEMKDHLRNVMNRLVFHVECHDLFYGEIERQYPLAYELAKIGLQELGRLLNRCVPTVEFGYLALYFELALRGNYEAGAKKEIAVICSTGHGTALIIQRQLEKVLGPDVQIAHFSEEEAERRELNQYFAIFTTIPLKNIRPQTPMIHLTNLFNDTWLRNEWQRAKEIRSVESQNIHMTYQLLENTQGYRANIQKMVADLEAEKLVDPQFIERIFTREDQQTTIFESGIAFPHTINQALPTIILSIGVFEESLVTPEGKVDVILLLGIPEELTATVEAELLQLYDRLFTIAGDERLRNELRKQRDVLAVKEWMQRKGIII

SEQ ID NO: 5868 - protein, 171 aa, Enterococcus faecalis
RVDAKEGDYHMSFIYVFGALFLTAYFVQIAMGMKQIKHFNQNYQELRQLGKVAIGRRAWKLKAGTIILFAVDSQGKILAARKMQGVTVLAKFHPLPQYVNEDIHYMDHYHPLVQKENKLTQQAMENAREIYLRVELGNYQETQPLTPLNGAKIQWQLWKNKVQTKLKGSVE

SEQ ID NO: 5869 - protein, 195 aa, Enterococcus faecalis
STNKIERKCRVMSYITKFAEGFMHLFQTGAETFISWMTGIVPVVLMLMVAMNTLIAFLGEERVTKVAKLSAKNPVTRYLVLPFLSAFMLGNPMSFTMARFLPEYYKPSYYAAQAQFCHTSNGVFPHINPGELFVWLGIAQGIDTLGLNSMDLAIRYMFVGILMNFIGGWVTDFTTAYVCKQQGITLSKTVEIAVD

SEQ ID NO: 5870 - protein, 342 aa, Enterococcus faecalis
RLLWIRKEQGEMTYNSIKVVKGNGGYGGPLVITPTEEKHKFIYITGGGEKPAIVDKIVELTGMEAVNGFKTSIPDDEIALAIIDCGGTLRCGIYPKKGIPTINVVPTGKSGPLAQYINETIYVSAVGPKQITLTSEEASADTEKPTSKKTEFKYDTSKKITEQKAEQQSFVAKIGMGAGKVVATFNQSAREGVQTMINTVIPFMAFVSLLIGVIQGSGIGEFFANIMAPLAGNIVGLTIIGFICSLPFLSPLLGPGAVISQVIGTLIGVEIGKGNIPPQLALPALFAINTQNACDFIPVGLGLEEAEAETVEVGVPSVLYSRFLNGAPRVLVAWLASFGLYS

SEQ ID NO: 5871 - protein, 126 aa, Enterococcus faecalis
KIFFGGWEMSVFTTKVQSIGPEAELFKEEKMVILFGKDAPDALADYCYNIEVQPVTEAITDKQTLVIDEQTYQITAVGEVVLTNLDTLGHITIKFDGATTPELPGTLYVEEKAIPEITVGTTITIL

SEQ ID NO: 5872 - protein, 226 aa, Enterococcus faecalis
KMEFMLDTINLEAIRKYQKILPLAGVTSNPSIVKQAGKIDFFAQMKEIKKTIGQASLHVQVVGQTTEEMLEDAQTIVQQLGQETFIKIPVNEAGLAAIKQLKQANYRITATAIYTEFQGYLAIAAGADYLAPYYNRMENLTIDSQKVIEHLAAEIKRTNAKSKILAASFKNVAQINQACQMGAQAVTIAPELVTQGLAMPAIQKAVTDFQEDWVAVFGVETVNELA

SEQ ID NO: 5873 - protein, 67 aa, Enterococcus faecalis
KEREEKAAIFLLVLFLFHMKHLRLFTCLKIRQFSLFVKEFLKKKGYLLGIFFGSSMMRVSNDRRKRE

SEQ ID NO: 5874 - protein, 290 aa, Enterococcus faecalis
DTQMEIMKHLPRPRKPKGVDDKSAYIVGGGLAGLATAVFLIRDGQMKGENIHIFEELTLSGGSLDGKFIPHDGFVTRGGREMENHFECLWDLFRSVPSLEVEDASVLDEFYRLDLDDPNSSNCRIIHNRGERVPDDGQFTLSKKAQKEIVDLFMTSEDQLIGKKIEDVFGEEFFESNFWIYWCSMFAFEKWHSAIEMRRYIMRFIHHIKGLPDFTALKFTKYNQYESLVKPLLSFLTNQGVDFQYETTINDIQVDIKGATKVARRLLLTQAGKTKAIPLTEKDDGVSPMG

SEQ ID NO: 5875 - protein, 83 aa, Enterococcus faecalis
SKEITLLDVRTPSEYRAGHIPQAINVPLNKIPAYNKSANEVYVICQSGMRSKNAAKILARKNYHVINVRGGMSQWSGQIKGGK

SEQ ID NO: 5876 - protein, 549 aa, Enterococcus faecalis
MKIVIIGGVAGGMSAATRLRRLMEDAEIVVMEKGPFVSFANCGLPYYVSGEIAEREQLLVQTPEALKARFNLDVRPHHEVVAIDPIEKVITVKHETEILTEHYDKLILSPGAKPFVPPITGLAEAKNVFSLRNVPDLDQIMTALTPETKRAVVIGAGFIGLEMAENLQKRGLEVTLVEKAPHVLPPLDEEMAAFVKAELSKNNVQVITGQSAVAFEEEGQVIRLEDGQTLASDLTILSVGVQPENTLAVEAGVATGLRGGIVVDEHYQTNQPDIYAVGDAIVVKQQITQEDALISLASPANRQGRQVADVIAGLERKNQGSIGTAIVRVFDLTAASTGLSERAAKAAGLTTAVVHISGKDHAGYYPGATDLQLKLVFHPTTGEIYGAQGIGAKGVDKRIDILATAIKGQLTIFDLPELEFTYAPPFGSAKDPVNMLGYAAMNLVEGLSENVQWYELSNELANGAVLLDVRNPAERANGQFKNAVSIPLNELRERLEELDKSTEYIVSCHSGLRSYIAERMLKQAGISAKNLDGAFALYRMVKPEELENV

SEQ ID NO: 5877 - protein, 100 aa, Enterococcus faecalis
KMYNTIGMPEFYQEAKRKKLPIIDVREEMEYQLGHVPQAINLPLSTLTENYQQLDKNQPYYLICQMGSRSAQACAFLSQQGYQVTNVLGGTSGWLGQLEQ

SEQ ID NO: 5878 - protein, 388 aa, Enterococcus faecalis
MKKSGQKKRNKKVWFGIGAAVVVVGFIGAKTVFSSKEVEPEYTTYTITEMASLKLDGQVSFLDTRDIFFDPSLGKIAEINVENGKEVKKDSPLLTYNNSDIQATETEQANAVNRNNLQVQQAQENVNLATQKYNEALNKVAAAKQKLNTAKEAEEKETLNAEIQQLNEAVSAANSEVAQANQALQLANSDAVGAANTLEQTRGKVNTVVTAPIDGQVTVDASAMSSTDKPVIKIATQKKNIQGKVTEYDYDKLQTGEEVTVTTVGSGKSAPGKIVSIAQTPIAKNEGNPVVSYQFTVEGDFPWAEGLSTSIAVPQKQMIIPTAAIQKEGQKEFVYVYKAGKAKKTPIETETNLGRKVVKSGLNWKDQVIANPNKELKDNQDVQVAAND

SEQ ID NO: 5879 - protein, 226 aa, Enterococcus faecalis
LPMIKLAHIHKYYYSEEETLHVLDDINLQVDAGEFLAIMGPSGSGKSTLINLLGFIDKKFEGTYLFEDREIGDFSDKELSRIRNEAVGFVFQNFSLIETLTVEENIELPLLYSGLTPKEAKDRVHEVLTKVGLPDKGKKHPKQLSGGQQQRVAIARAIVNRPSFIIADEPTGALDSKTSEEILTLFQQLNNEGVTIILVTHDEETIEYCNRLIKVRDGKILEEVLT

SEQ ID NO: 5880 - protein, 411 aa, Enterococcus faecalis
WKDFRGGADMKRSIIWKTAFRSILKNKRRSLLTMLGIVIGIASVITIVAIGNGFKEDMVDKLSAEKQKENVKKISFSAYNTSDMFSDQAMFTDNDLGVVRMVPGVEKIDFDQREVDGAQKGTLNFQAGPKNLSVTYELANKTTKELLAGRQLNDGDNAKLDKTVVVDELVAKELYQDSTAAVNRTFPYKEQLFTIVGVTTNTSGAIGPGNDDSLLYFPKKTYEHYFGKLKDTSTLKLTVAPGYQPDQVLKETIKTLSQQGTMKNSGTYQEYNVKDTIKEMGSLLNNLTLFISAIAAISLVIAGVGVMNMMYISVSERIKEIGIRRALGGTASDIKKQFLTEGIALTLIGGITGYLLGMIIAYLASMALPFSVRPDLMTVSLAIGISVFIGVVFSYFPASAASKKDLIDIMK

SEQ ID NO: 5881 - protein, 254 aa, Enterococcus faecalis
ILIRKISSILNISKQNTKIEKILNQKRIKEESRMKIMVITKNILSETAFQNRLQHLDHQVFCTTCLIGEIKESHLFYRKFDAIILSETIPRKEQYLYLKELARVKTPLFLRSEDIPTSEELSISYQYGILNWLRLDATLDTLRENLLLAELNKPIQREDEKLDVEGIKLTAAERALLAVLYSTPKEHLPMERLCKLIYDTEETANNRKKMTKQLTKLNKKIQVGSFKKQGIQNTRYKGYKLHPQLLPYIGELFT

SEQ ID NO: 5882 - protein, 105 aa, Enterococcus faecalis
YRRWVCMKDGLYWVQQLKEQKVSRIELLKDIEKKVQKLNPKINGFVTFDSQEAEATYQKNKQQDTLFAGLPFPLKMLGQEKAGWSATAGSQLFKKTFATRIFRGE

SEQ ID NO: 5883 - protein, 194 aa, Enterococcus faecalis
ANLVRIRSRCIKRKEVAEVSKKEEKQEELQEEMEAVDAAGVSEVEVEATEIENLKAELSEMEDKFLRARAEIANMSNRNKNERELLVRYRSQDLGKKILPSIDNLERAMAIEVSDEQGESLKKGISMVLGSITVALKEEGIEEIPAMGETFDPNLHQAVQTVPASEETPADTIVEVLQKGYKLQARVLRRPKCP

SEQ ID NO: 5884 - protein, 352 aa, Enterococcus faecalis
RVVIRLLTERQPNILRLIIQNYTNTGLPVGSKKLMEDGIASSSATIRNDMKALEEYGLLAKTHSSSGRIPSMAGYRYYVDHLLQPTQVEENELRRIRQSFGKEFHEINDIIRQSAEILSELTSYTAFSLGPEVKERKLTGFRMVPLNDRQVLAIIVTDKGNVENQVFAIPAAVSSQDLEKMTQIINDKLVGQPLLTVYHRLRTEIPMILHRYFQTPEGMMNLFDEMLGHAFEEKVFVGGRMNLLDFGIKQDIEQLKSVYSFMQNSDELTHLLNGSATTENPIVFRIGSEIGNNLLEDMSMITATYEVSGHGKGTIALLGPTSMPYSKIFGLVDTFRHELASQLGDYYRFLGN

SEQ ID NO: 5885 - protein, 397 aa, Enterococcus faecalis
NELMTKTNQLSTSTPMFDRSAYIHIPFCEHICYYCDFNKVFLEGQPVDEYIQSLLKEIQLTQALYPEQEMKTIYIGGGTPTSLSAKQLDVLLKGVREQLTFDDRNEFTVEANPGDLTQEKLQVMKNYGVNRLSMGVQTFDDRLLKKIGRKHTAADVYETMKFLEKENFTNVSIDLIYALPGQTLESFRDTLTRALALDLPHYSLYSLILENKTMFMNWVRQGRLQLPEEEIEAQMFDETIEAMEKKGRHQYEVSNFALTGKESQHNLAYWNNDHYYGFGAGASGYLGQTRYKNHGPIQHYLKPLRENQLPIVETEELTRLNQIEEELFLGLRKKVGISKQKFQQKFQEPIEAIYGEVIQRLIKEELLIEEADILRLTKKGLFVGNNVFEAFLLSEKE

SEQ ID NO: 5886 - protein, 888 aa, Enterococcus faecalis
KKMEKKMRHLGHDYSYKKFAHSEVEKVLQRFGSTWDGIKHQDIEELQERYGRNKIMNEKKASRLRLFIKSYITPFTLVLLALATISFFTEYVYAAPEEKDVTGVLIMLAMVILSGTMSFVQSVKSSNAVEKLQNMIKVTATVIRDKKQMEIPIEEVVCGDLVQLSAGDMIPADLRLIQSKDLFVSQSSLTGESFPIEKHATHQKDSDQIDTEYDNLLFLGTNVISGTGLGIVIKVGNQTLFGRMASDNGEEQQQTSFETGINKTTWVLIRFMLVITPTVFLINGLTKGDWAEALMFAIATAVGLTPEMLPMIVTTNLVKGSREMAKEGTIMKNVNAIQNFGGMDVLCTDKTGTLTQDKVILEYHYNIGCQEDQKVLDLAFLNSYFQTGLRNLMDNAVIQAATQESDIQSDDFYKVDEIPFDFNRRRMSVIIKEFKTRETRLITKGAVEEMLLVCTQVLLNGEIVPLTETLRQKITKDVEALNRDGLRVLAIADKKVEAAEWEYTTKDESELILQGYLAFLDPPKETAAAAIHALHQHNVAVKVLTGDNQYVTHSVCKEVGLAGEKIITGNELQQLNQEELRKTVQAYNIFAKITPDQKVRIVNALTENGQTVGFLGDGINDAGAMRAADVGISVDTAVDVAKESADVILLRKDLMVLEKGILSGRRVFTNTMKYVKLTASSNFGNVFSVIPASIFLPFLPIAPIQSLLLNLIYDTSCMSVPWDKVDEEYVEKPKKWEPKSIGNFMRWFGPTSSIFDIVTYLFMYFIVCPAILGGSFFELNGADQLLFIGIFHAGWFIESLWSQMLVLHFLRTEKMPFLQSSASGIMTLVTTAGIVLGTVLPFTAFGAELGFVGLSPSYFLYLIPTIVAYLALVAFIKVLYVKRYGQLL

SEQ ID NO: 5887 - protein, 318 aa, Enterococcus faecalis
SKDHQIALSRSFSSAIFCIVKETAVRKMKLQQLEYFMAVSKYASFTLASQKLHTSQPYLSTQLKELERELGASLILRDKKHCRLSPAGEVVAKRTEMIFALIKEAQEEINELVTQGSTTTIRIGTNLIDIDKAFGEVLLLFNQSYPYVSIDFKYYYDLETALETDLIDIGIGIFLDTSIPLEKELIYTESYLLCVNKNHPLAHADSVTIDEIRSLPFAAYSDQVYEKKVFKRWERKINWENRQIVIELPSLHLVLDMVQREKACSILPYSLTDELNRRNLVGIPLEDSPERAIYLVQNNHHGHCEAHRYLFEQLRYLF

SEQ ID NO: 5888 - protein, 317 aa, Enterococcus faecalis
STPLFIRTITLFILGIEKGGIPMELFRLHYFLELCKVKQFTKAAENLAISQAALSKQIKILEATLGAELFNRQGQTTTLTPAGLILEKYCWRITNELVSIEEELKEINHSSNHIYVATYLCDLEYKLNDLLMTTLTDRSSNLQVHTIITENILQSLETMDADFGISFADLPLPEHIGKIDLFTANYQFILRNDHPALAKATTEEILKELTMYPFVRLNTEFSEQNKLTNWLDTTFSNFSPEKVIQVDTLSLITHLVSHSDSFAIVPEYTNIQLLDNSIHTLTYQELPKRNMAVYYLKERYMSRQLQQLLAECQKQFQ

SEQ ID NO: 5889 - protein, 382 aa, Enterococcus faecalis
MVNTKKIHLLLNYDLLLPIFLLTLLSSGVQYWIAVNEGKDGTVPALKQLFFIFVGYAGMFLASRLSQKFIWKVAPFFYGFSLILMSALYFSYDKGMYLLTGTKRWLDLGFIKFQPSEIAKIAFILMLAKIIVQHEQQDWSDKWRSDKQLLKKIVAVSVPVFFLMAVQKDFGTSLVFVTIILSLLVISGIDRKILIIIFSALATLGVVLILLVFTEWGHKVLFFLHFKQYQLDRILAWIHPYDYVDKISYQQVQGLLAIGSGGLFGKGVHGIEVYVPVRESDMVFTFIGEAWGFVGSATVVFLYFYLFYQVLVAGLRSNSRFCMYICVALIFSLVFQTVENIGAVIGLLPLKGIPLPFLSQGGTSLVMAITSLGFVKGREAAT

SEQ ID NO: 5890 - protein, 399 aa, Enterococcus faecalis
LEKDRGERMNLRTLGLTKILLTFIILSIIGALMIYSASSYDLLMQGVKPTAVFIKQGIIMCLSWVLMFVIYKVRLEVLFNKKIAIGLLLVSVLLLLMVRLPFFGVAANGAQRWISLFGIQFQPSELCNFAIIYYLSCYLGEKENGLTTKQLRKQWLFVLVVAFLVLIQPKVGGAILILVIGSVLIFSASIHAKFSVIAAGIVVASAALLSKIIIFLGDHRYLPHFFAHVYDRLVVLKNPFLSFHDRGFQPSMAYLAMYNGGFWGTGLANGMVKKGGLPEGQTDFIFAVIVEELGLIGGLLLLFLLLFLAASILRSSCVIKNHCYGLFLLGVGTLILAQTAINIGGVLGLIPMTGIPLPFVSYGGTSYLIFSVALGIVIKIIANEKAQLNGQYKKNSLTS

SEQ ID NO: 5891 - protein, 102 aa, Enterococcus faecalis
IINFLNNSQNKKRRINMVENFFKEGKLLVIPKKNAKKVQVFQRVANQFEFGKEYTEKEVNQRLREIYEDYALLRRYLVDYQYLERDKFGKIYQKCEQHTKII

SEQ ID NO: 5892 - protein, 114 aa, Enterococcus faecalis
SMSNFKALIKKVVGDKKEYKEYKRRIAALPVEYRQVFQEIEKYAWHFSDHSGANMFNALTDLLDLFEEGAANGTPIKNITGEKVGDFAETIVNEVAGKWTDKQKEKLNHQFSKQ

SEQ ID NO: 5893 - protein, 65 aa, Enterococcus faecalis
HALSLHFFSSCLLVLKATSIAAKNQRVLLLLMRLSDRTSALALLSEGFFHLDPIVFIADRPNYGI

SEQ ID NO: 5894 - protein, 212 aa, Enterococcus faecalis
GSYTVYSPNFSGHGTLVPEDILDQTTEQWWQDTQEAVAFLRERGYQEIAIFGLSMGGIFSMHALTEQLTGLIGGGFFCSPIYPVENKVPENFVLYAENVMKIAEVPAEEQQSRLQSIEQRVKQQLGAIETIASQTADKLNKIHAPLFLAQAGKDEMIEPMGVYQTAQALTQARVTLQWYPNSGHVITVSGEHKQLEQDVVQFLATLPWNEEK

SEQ ID NO: 5895 - protein, 792 aa, Enterococcus faecalis
GEIMTKQTIKEQILHFMESQKKKSFSMEEIAQGLNLEKSSDFKILVQTIAQMEREKSVSFNKKGKVLLPMKDLLIEGTFRANERGFGFVTIDPEEPDVYIPKEATNFAMDGDTVLIDVIQHADPFSDRGAEGKVKEIKERAVSQVVGEFVAYSEEEMAEMGLYGYMIPKDKKLNQYTVSIAPEGIKPVDGSIVIAEITYYPDQEYPTSMEGLVKQVIGHKNDPGMDILSIVVAHGIPTAFPDEVLAEADQVPETIAESDLVGRRDLRDQLIVTIDGEDAKDLDDAVTVQKLANGNFFLGVHIADVSYYVTEGSQLDMEAYERGTSVYLTDRVVPMIPQRLSNGICSLNPHVPRLTMSCEMEITPEGEVISHEIFQSVIQTTERMTYTAVNEILEEQKPETLERYKELVPMFKEMGELHHILEEMRMRRGAISFEDREAKVLVDENGHPKDILLRTRGVGERLIESFMLAANETVARHYHDLKLPFIYRIHEQPKEEKMQRFFDFAAVLGILVKGTKENISPKDLQKVLEQVENKPEEVVINTMLLRSMQQAKYSEDNYGHYGLAAEYYTHFTSPIRRYPDLIVHRLIRSYSQDQSEKNQEKWNEALPEIANHSSSMERRAVDAEREVDAMKKAEFMVDKVGETYDGIISSVTKFGIFVELPNTIEGLIHVNNLKQDYFHFIENHMALVGERTGMTLKIGQKVQIRVEKADPETREVDFELISAEEVAPVEGPKGRKKGKANSSTRSNNQRRNKKDESFDGKKKKNKKKGKGKKQPFYKEAMKQKNKKGKKKK

SEQ ID NO: 5896 - protein, 158 aa, Enterococcus faecalis
RRSLMPKGEGKLIAQNRKARHDYSIIDTVEAGLVLQGTEIKSIRNGRINLKDGFARIRNGEAFLYNVHISPYEQGNIFNHDPLRTRKLLLHKKQINKLIGETKNTGITLVPLKVYIKDGYAKVLIGLDKGKKQYDKREDLKRKEVDRQISRTLKNNRR

SEQ ID NO: 5897 - protein, 241 aa, Enterococcus faecalis
IDLEEKKLLFNIGPIWFDGTIVLMVLLTCIIVFAFVYACTRNMKLRPKGKQTVIEWLVDFIRGIITDNLPRKEVSNFHLMAFTLFMFVLVSNILGLVTKIVVGDDLSVWKSPTADPIVTLTLAMMMIVLTHFFGMKRFGFKGYLVNSYLRPVGFLLPVKLMEEFTNLLTLGLRLYGNIFAGEVLLGLIAGTVASVGLWVIPLAIPLEMIWVAFSIFIGCIQAFIFVTLSMVYMSHKIETEE

SEQ ID NO: 5898 - protein, 89 aa, Enterococcus faecalis
SRNTKDKNYLLGGFYTMEGLNFIAAAIAIFGSAIGAAIGNGQVISKTIESMTRQPEMSGQLRTTMFIGVALIEAVPILGVVVSLLLLFR

SEQ ID NO: 5899 - protein, 178 aa, Enterococcus faecalis
DFMLLTTLVVGETAPSTTLGTMIVVSGAFLILMLLLKKYAWGAIVDILTQREEKIANDLDSAEQSRVAAAKMEKERQQQLLSSRSEAAEIIKNAKESGEQTRQKTLKETTAEVTRLREKARTDISQEREEALSSVKNEVADLSLQIAAKILNKELTPDAHEALIDSYIESLGKANETR

SEQ ID NO: 5900 - protein, 183 aa, Enterococcus faecalis
VKQMKLDKYTVGKRYGKALFELAVEKNQAEAIYQELLTLREVYHQVPGIGDILSDDRLEPYEKDSIMEKLVTGFSEMMQNFLRVVYEYRRMYDLLLMIDEYERRYDEHQGLILGSVTTAIPLSKEQHQAMEEKAAQLLGYEQAHLVNLIDPSIVGGVVIEANHQVIDGSIRKQLEHMQQKLLK

SEQ ID NO: 5901 - protein, 518 aa, Enterococcus faecalis
MAIKAEQISALIKEQIENYQQQLAVEEVGTVTYVGDGIARAHGLENAMSGELVEFSNGSYGMAQNLETNDVGIIILGDFETIREGDKVQRTGKIMEVPVGEALIGRVVNPLGQPLDGLGEIKTDKTRPVEATAPGVMQRQSVAEPMQTGLKAIDALVPIGRGQRELVIGDRKTGKTSIAIDTIINQKGQDVICIYVAIGQKESTVRNQVETLRKFGALDYTIVVTAGASQPAPLLYIAPYAGTAMGEEFMYNGKHVLIIFDDLSKQAVAYRELSLLLRRPPGREAYPGDVFYLHSRLLERAAKLSDELGGGSMTALPFVETQAGDISAYIPTNVISITDGQIFLESDLFYAGTRPAVDAGLSVSRVGGSAQIKAMKKVAGTLRLDLASYRELEAFTQFGSDLDAATQAKLNRGRRTVEILKQKLHAPLPVEKQVLILYALTHGFLDSVSVDKILHFEQDLFDYFDGKHADLLETIRTTKDLPDTDALDAAITEFSEMFAAANNSGDSAKEALEKIDNA

SEQ ID NO: 5902 - protein, 304 aa, Enterococcus faecalis
ATLGASLNEIKQRIASTKKTSQITKAMQMVSAAKLTKSEGASKSFQEYSSKIRSVVTHLVAAQLSELRETEQSSLSEGNYHVMLAQRPVKKTGYIVITSDKGLVGGYNSSILKQTMSMIQEDHDSNKEYALIAIGGTGADFFKARGIDVSYELRGLTDQPTFEEVRKIVTTATTMYQNEVFDELYVCYNHHVNSLTSQFRVEKMLPITDLDPSEATSYEQEYLLEPSPEAILDQLLPQYAESLIYGAIIDAKTAEHAAGMTAMKTATDNAQNIISDLTISYNRARQGAITQEITEIVAGAAALE

SEQ ID NO: 5903 - protein, 477 aa, Enterococcus faecalis
LYEDWRKEIMSSGKIVQVIGPVVDVEFSLDQSLPDINNALVVYKNGEAKQKVVLEVALELGDGVIRSIAMESTDGLQRGMEVIDTGKSISVPVGKDTLGRVFNVLGDTIDLEAPFPADAERSGIHKKAPAFDELSTSNEILETGIKVIDLLAPYLKGGKVGLFGGAGVGKTVLIQELIHNIAQEHGGISVFTGVGERTREGNDLYYEMKDSGVIEKTAMVFGQMNEPPGARMRVALTGLTIAEYFRDVEGQDVLLFIDNIFRFTQAGSEVSALLGRMPSAVGYQPTLATEMGQLQERITSTKKGSITSIQAIYVPADDYTDPAPATAFAHLDATTNLERKLTEQGIYPAVDPLASSSSALAPEIVGEEHYEVATEVQHILQRYRELQDIIAILGMDELSDDEKVLVGRARRVQFFLSQNFNVAEQFTGQPGSYVPVAETVRGFKEILEGKHDNLPEEAFRSVGKIEDAIEKAKQLNY

SEQ ID NO: 5904 - protein, 64 aa, Enterococcus faecalis
TTRKAANTMDSLTVNVVTPNGLVYDHHAKIVVAKTTVGNLLFTQNSPHFFLGGGWIDPLFKGGV

SEQ ID NO: 5905 - protein, 109 aa, Enterococcus faecalis
EVIVLKKMNIIYPPLVEQSFQFYQDYEQERYDKSELYRIMVMKNIINENGTPTEEALKKGLVKDFYEEYDLSLEEFLKLYPCFNNYDPDYFQKIDGFWEVPVCLKEELI

SEQ ID NO: 5906 - protein, 90 aa, Enterococcus faecalis
ICCGPDTWERDERINLDNPKESIKTFYPSKGQYNTIEVKNGHVRVKKDNSPDQIAVKTGWISEPGQTSICIPHRFILEIVQQYSKDYYIY

SEQ ID NO: 5907 - protein, 361 aa, Enterococcus faecalis
LNGGFMNNLFIFVCFCFMWLMIFGVILYYVGLVNHRYIHHTLILGLVTIISGTLCWLFVGYSLSFFGNIQYSIFYSPLASSEIVSILIQLLFCLYSVIMIIGSVLERGNWKYIVLFVPLWIVFVYAPVCFSLWGHGNWLGKIGVLDYSGGLVVHTTAGIGSLVLAITSPIRLKNSLIFKSQEMIAFVGMLFITLGWFGFNMAPSGKIGEESIQIWLNTLISILGGSISWPFTQWILIKKVSIYSIMNGIIGGLVGSTCSVGYISPAISLLISVIVCTLCPIVIHIMHLRIANFDDAADSFGMNAVGGIAGSILTGVMAEKGDFFLQLFGTFLISIWSLSLSLLIHYLLKKMVNDCDSQCIR

SEQ ID NO: 5908 - protein, 65 aa, Enterococcus faecalis
MDSSPIFPEGAILNPNHPKVINSIPTKAIISCDLNINEFFKRIGDVIAKTRLPIPAVVWTTSPPE

SEQ ID NO: 5909 - protein, 378 aa, Enterococcus faecalis
IMENKEVIIIGAGAAGVGMGVALKDFGINNFAILERKQVGNSFIKWPEETRFITPSFTSNGFGMPDLNAIAIDTSPSYTLGKERLSGKDYAKYLQLVSEEYKLPIKTNCKVQSIKKEKTGYLLETTKGIIHAEYIIFAMGEFSFPNKSSIKGAYKNSLHYGEINSWIEIKGDKQTIIGGNESAIDAAIELAKLGKRVTIYTDTLGLNIRDADPSKRLAPRTRQRFFDLRVNKKKLDSIKIYTTIKVKKIEKKSTSYILITENGKSLPVENIPILCTGFKNGTKSITASLFKYKENGEVLLNDFDESTIAKNIFLTGPNVRKGNTIFCYIYKFRQRFAVIANEIARRKHITIDEKKLSYYKNQSFYLDGCSGCEVRCSC

SEQ ID NO: 5910 - protein, 62 aa, Enterococcus faecalis
ISHYFFFFNTNTRRINNKKIVPIKPNRNNIYSPVDVVLFKFYLKLDMLLINIGIDTVSLSSK

SEQ ID NO: 5911 - protein, 112 aa, Enterococcus faecalis
FSSDAPLKKLVTDITYLPFGKKQLYLSSIMDLYNGEIIAYTIGDKQDTDFVLDTFDQLPQTTDCLLHSDQGSVYTSFDYQNQIKKGITMSSSRKGTPSDNACIESFHASLKS

SEQ ID NO: 5912 - protein, 102 aa, Enterococcus faecalis
GAKKVQRIGKNVEPEVFVELVKRMKGKLPITALCQLFGISRATYYRWTHRKDLGKLTPLEEAVRRLCFQHKFRYGYRKITALINQEYKVNKNTVQKIMRKYH

SEQ ID NO: 5913 - protein, 79 aa, Enterococcus faecalis
REFNKRCFFLSQFIGSVPYLFGHFYFSKGVLIFIQKIIQMSINLINCYLDFSSSCCTKFYLIYRVLIVQYLKISVLKVR

SEQ ID NO: 5914 - protein, 393 aa, Enterococcus faecalis
FKERKMISSKYTIREQNEAQILNQIIKHREISRAELSKITSLNKASVSSITNKLINDGFIIEKRIGEATNRGRKPIMLTFNGSSSALVIAIDLGYNYIDGALASLDGKEIHRVQLIDTYVNKKNVQDLIHKVFNQLTSDCPHTHYGIVGMTIALQGQVLNNKIISTSYNDLAEINLVEMLNQEYNFPVFLQNEANLSALGEYTFSSDIENLASISLHSGIGVGLVKNGKLDVGNKGYAGQLGHTILFPNGRKCTCGNHGCLEKYCSTQVIYHEISKEKNLNKINSDVVSILYNNKESKVVKMIEQYAYYLSIGVNNAIMLYAPELVIFNSPLTKKIPDIINIIQRNLNNQFTKDVLVINSPIEWNPVISGAISLSIQKFLNIEQLKLGKLNKI

SEQ ID NO: 5915 - protein, 70 aa, Enterococcus faecalis
PRSIAITKAEELPLKVSMIGFLPRFVASPILFSMMNPSFISLFVIEETDALFKEVILLNSALDISLCFII

SEQ ID NO: 5916 - protein, 697 aa, Enterococcus faecalis
EEIESGLEDVIEVTPKSFSRTFDDELLIVEAWGENAVRVRSFVDMNFENRLNSLIGEPDALGTVIINQDKNKTELINGKIRVVLDHRDRLTFYNEKNGVLLKEFIRLRAVKHDDGSEDAGTIEITKDFNSTLKLKSREYHSNLQGGFQVTTRFESESSEKIFGMGQYQQSYLDLKNTVLELAQRNSQVSIPFYVSSLGYGFLWNNPGIGEVSFAKNMTRWKMASTNYIDYVVIAGDTPKEILRNYSDLTGKVPKMPENLLGLWQSKLRYRSPNEVMDVVKKYYALGIKLSTIAIDYFHWPKQGEYRFDEEYWPQPEQFLRTLRDEYNVEPIISIWPTVQTDAMNFNEYLENGYLVKVNRGVRLTMQIQGNTIFVDMTNEKAREYVWNLIKKNYVNKGVKYFWLDVAEPGYSVYDFDNYRYKKGTDLQIGNLYPIDYLSMISEGLGNNQSVVTLVRGGWAGAQRYGALLWSGDIDSSFEAFRNQVNTGLNVGLAGLPWWTTDIGGFHGGDPKDPEFRELLVRWFQYATFSPILRMHGDRLPHSKPLSDHGGGSMVTGAPNEIWSYGKEVEQILTKYIKIREELKPYISKLMRQAHEFGDPLMRTLFYEYPHDQNAWNIEDTYLFGDAILVAPIENYKETSREVYLPKGESWTNLWTRESFDGGKTVVVEADIQQIPIFIKTSEKGKFSKLFDVIKEEN

SEQ ID NO: 5917 - protein, 265 aa, Enterococcus faecalis
GGKLMEASIFQLVLIVLYGFFINFEKNSTMFGTYQPVTAGFVTGLILGDISTGLFIGGTLQLLSLGISNFGGASIPDYQTASIVATFITITTGQKPSVGISIGIPVALLMVQLDVIRNTIGIWMVHKAEAGVKKGDYSMITKMQMFGVFLTAATTGIPVALAVIFGPSLINTILSYTPEWLTNGLTVAGGLLPAVGIGLLLRYLPAKEYFSYLVIGFVMAVYMKIPLLGVALVGAAIALIIYKKNSQDLVKNTVINIAGGMDDDE

SEQ ID NO: 5918 - protein, 74 aa, Enterococcus faecalis
LKYSFAGKYRSSNPIPTAGSKPPATVNPLVSHSGVYDRIVLINDGPKITANATGMPVVAAVKNTPNICILVIIL

SEQ ID NO: 5919 - protein, 276 aa, Enterococcus faecalis
QGGWMTMNNIEQLKLRIDTKTKRSVLWRWFFTSSVSSNYEKMQALAYCYAVLPFLKIAYKNKPEALQKAVLNHLQFFNTNPWVAPYILGINVAMEENADENTEEAVTSIKTGLMGPVAGLGDSLFVVIPWTIFGAIAANMAIDGSPVGILLWIVVSVALKLVSIPLFNAGYASGTKLIATIEKSLKLLTESTSILGLMVVGALIPSVVKANITLNFKQGNFSMKGQDILDQIMPGLLPALLVGLVFWALKKNVKPIYLILGVMVLSIVLAALGILK

SEQ ID NO: 5920 - protein, 168 aa, Enterococcus faecalis
NNLWEAFSMEMKGINNIRIDDRLIHGQVATMWSNKLGVTRLMVVNDNVAKNDLQKQVLRMAVPAGISSSIITEETAISNIKNGKYEGQNVLMIVKSPVDLLPFIENDLEIKRINVGNMSNRNNTTVLRPNISVTDEERFAFEKLLSLDIEITTIMTPDDKKTFLKDIL

SEQ ID NO: 5921 - protein, 148 aa, Enterococcus faecalis
KDFFKRYIVKEIIMTNEVILMSHGLMAKEILNSAQMILGDQINYPVVSMTPDDGIEGTFNKLDKIIGTLNDAKRIVILADLMGGTPANTAMMLASEDSRIQVITGVNLGMVLESFFAIKEENLVEHLLKIGTESIKIPKLQIAEEEEE

SEQ ID NO: 5922 - protein, 75 aa, Enterococcus faecalis
NNNFKDDKETFNMVYFPKIEKIKYEGTNTKNMYAFRHYNPEEIIMGKTMKEHLRFAVAYWHTMTQDVTVPSSTRI

SEQ ID NO: 5923 - protein, 135 aa, Enterococcus faecalis
MNTIIDLANTIFKPLIDLGAAPLMTIVLTLIALCFKVKPTRALEGGLKLGIALTGISAIIGILTTAFSDAMASFVERTGISLNITDVGWAPLATITWGSPYTLYFLLIMVIVNVIMLILNKTNTLDVDIFDIWHL

SEQ ID NO: 5924 - protein, 108 aa, Enterococcus faecalis
GDPQVMVAKGAQPTSVIFKEIPVRSTKEAIASEKAVVKIPIIALIPVKAIPSLRPPSNARVGFTLKQRAISVKTIVIKGAAPKSIKGLKIVFARSIIVFIYFLLHKLR

SEQ ID NO: 5925 - protein, 140 aa, Enterococcus faecalis
RLSWILLTRQTVHHYWLFFNVKIKKKFIVFYKKILKERFNMIKILAACGAGVNSSHQIKSALETELSKRGYQVSCDAVMIKDINQEMLSHYDIFAQIAKTDLGFPITIPVVDAGAILYRIPAMAEPVYQQMESIIHSLNK

SEQ ID NO: 5926 - protein, 172 aa, Enterococcus faecalis
YIKETRGSMVIQTSIFSLDTTYISNKKTQEEVFEEVYLDLLKKKLVTPDFLTNLLEREHNYPTGLSLTPIDPALPNIAIPHTESTFVRTTRIIPIKLKQSLSFHNMIIPDETLSVSFLFMILNENGIEQTGLLATIMDFINTTDRSSLLAFFQCEDKEEVYRFLQKNFKGEI

SEQ ID NO: 5927 - protein, 173 aa, Enterococcus faecalis
YCFIMFSRRGFEFKERDRILIVDTRGKEENKMRVILGSDLDGIKLKAEMKQYLLQEKVEVIDKSESASEDFIEATLAVAHEVLKDTESLGIVFDGYGAGSFMTAAKIKGMIVAELSDERSAYMAREHNNARMITVGAKIVGTELAKNIIKEFLTGHYAGGRHQIRVDMLNKMA

SEQ ID NO: 5928 - protein, 177 aa, Enterococcus faecalis
YKGSVFMKIAIGCDHIVTDTKIAVSDFLKAKGYEILDVGTYDFTRTHYPIFGKKVGEAVMSNQADLGICICGTGVGITNAVNKVPGIRSALVRDMTTALYAKEELNANVIGFGGKITGEFLICDIAAAFIEAHYHPTEDNEQLIEKINQVEKQHPEQQDAHFFDEFLDKWQRGVYHD

SEQ ID NO: 5929 - protein, 100 aa, Enterococcus faecalis
SRDVYMSAKEKTMKYGLVGLFLGILLLAHLDLLAENLSYLLLGLLLLLVAYLILVKKFYFFSNLIPKNTTDINLGKKYGTASGIGSLVIGIILIILGLFL

SEQ ID NO: 5930 - protein, 148 aa, Enterococcus faecalis
ERREEMTYLVLVSHGDFARGLKNSLGMFAGDEIEKVRVFGLQPGESTDNFGKRFLCEVEKLPQETRLIVLADIVGGSPLATICKVLDKQKMLENSLIVGGVNFPMALNALLLKETSELSDLKKMIVADACHGIRELTITEGDVTEEDI

SEQ ID NO: 5931 - protein, 174 aa, Enterococcus faecalis
RGYLKEKMNMSISFVRIDDRMIHGLITLRWTKEMPCDGIIAVNDKAASNPILKEAYKAAAQDKKTFIWTMAHFFDVKDKVLASKSKYFLITKSPLDMKKILVDWHFVPSEVKMINVGPGNDREGTIKLGDNQSFTAEEAAAFEEIEKAGYKVDFALLPDQRIGSWAHFKAKFGY

SEQ ID NO: 5932 - protein, 289 aa, Enterococcus faecalis
KEESSIMTINWIQAAILGLFACLCSNSCMAGQAVGNYTIGRPLVGGLVCGIILGDLKLGIACGVAMQLVYIALVTPGGTVSADVRAISYIGIPLAMVAISTKGLDPLGGSAADLAKSVGTLVGTIGTVLFYSVAALNLVWQSFGWKDIKKGKLDHLYAINFGWPWISHLLFSFLPTVILTYFGATAVTAMRDALPMDGLAMKTLFTVGGMLPCVGIAILLRQIVNKNIDFVPFFVGFTLAASLKLNLVSITIIALLFAVIFYKIALIKNNTKLVDSTGSLTNDDEEEDI

SEQ ID NO: 5933 - protein, 271 aa, Enterococcus faecalis
TQKTLKHSFDLWFWGALTCFSQQHMQTFGYLSSMLPIIKKLYPKHEDQVKAIQAYTAFFNTNPMLGTVIVGVTASMEEARASKNEIDGETINDMRAGLMGPIAGIGDSLVDGTLIPILLGISLGMSTGGSPIGAIFYIIVWTLISYFGQRFLYFRGYHFGDKAVSFLVGKEGAAVRVAIGVIGSMVVGGVLASWVNVTTSLKLIGADGKVFLKLQDKIDSIYPGLLTILVTLFCWWLMSKKHVSAIWTMLILVVISLVGVLLGVFNPGLTY

SEQ ID NO: 5934 - protein, 242 aa, Enterococcus faecalis
LKELYLMFHHILSEFMGTALMIVFGVGVHCDDVLKRTKYAGSGHMFAITTWAFGISVVLFVFGGVCINPAMALAQAILGMIPWSYFIPYVIAEMLGGICGAVIVYIMYADHFKLSADSVDPIAIRNIFSTNPNQRNLPRNYFVETFATFIFLTSILAIAHSYETQLPIAVGLLVWAIGMGLGGTTGFAMNQARDLGPRIAYQLLPIKNKTNNDWQYGLIVPGTAPFLGAIFATLFVKFFLKF

SEQ ID NO: 5935 - protein, 344 aa, Enterococcus faecalis
NRQIKPCVWCKTQIIFLFVNDRFVCSLIEKSDLSNFVKKHSKNVFYDIAKAEAAVHQQTIDTIHFHEVGAIDSIVDIVGFFILWEQLEIEQVYSTPITDGSGTITIAHGVMPIPVPAVMELRKETNLIIQQDFEIKTELVTPTGLAIFKELSPLFVAPEQRLIEKIGYGFGKRETGKFNALRGSIFTETHSKKKRTEHHDQVLKIETNIDNQTPEQLGYVMDLLLEHGALDVFFTPIHMKKNRSAILLTVLTTTEEKEYFTELLFKHTSTIGMRFQTMERSVMDRSFKILETPFGKVHIKKNHYHGLLKESIEYQDCERIAKQYNFTIEEVYRLVQTLNNKTID

SEQ ID NO: 5936 - protein, 109 aa, Enterococcus faecalis
GTNKTIIHEKKNNLSFAPNTRFDLPILLKDSFKPGDYTYTIKLKNHEGSWTFSKDFTINKKQADQYNKRSVDHKVKNLHWLKYLMAFLILVILGTVCYILGKKKGKMRL

SEQ ID NO: 5937 - protein, 375 aa, Enterococcus faecalis
IVKLALIYASHWCSLFWKVVLYYYCSMIHNRNKEERTMYKAIVAAKGKTTKIVEKESRPLKDNEARLKMEVCGVCHTDLHVKNADFGDVSGCTLGHEGIGIVTEVGKDVTSLKIGDRASVAWFYEGCGHCEYCTSGRETLCRSVKNAGYTVDGAMAEECIVTDGYAVKVPENLASEPASSITCAGVTTYKAIKESGIRPGQWLMISGLGGLGNLALQYAKHVFNAKVVAVDVNDNQLAFAKEMGADLLINPVKDPDFAAQLQKEIGGVHAAVVTAVAKSAFNGAVDAVRAGGTVVAVGLPVETMDLSIPRLVLDGIHVVGSLVGTRQDLREAFQFGAEGKVVPVCQTRQPEEINAIFEEMEQGKIRGRMVIDFRS

SEQ ID NO: 5938 - protein, 137 aa, Enterococcus faecalis
SENHERMDGMFANLTLRERRLLKQAQVGATISFILLFVPILTIILLHTSDLLAKWLGIVGVIMVLPLLYFAWQILKIAYKDQKDNPTPPLWVPKVYGIGLSINPYHRFGKLIFILLAVLIVGIIISLLFTPASQINH

SEQ ID NO: 5939 - protein, 72 aa, Enterococcus faecalis
FTYNDDFIAKISTSEKERLFQKSNTCCSNLVYLKIINTLLLSKRVLITRFLVIDLTCWCEKQTNDDANYQYR

SEQ ID NO: 5940 - protein, 373 aa, Enterococcus faecalis
SPCWPFKAIAFSQPYMNVQQRVIVRKEDKDKFHSTKDFEGVRAGAQKQTTQEELIKTELTGAVPTSLQKIPDLIMNLKNNKLDAVVMEEPVGEAYVSQNEDLAFADVTFEKGSKDTAVAFPKDAPVLTEKVNASIKQINDQKLMDGYKKEANQLMFQKDQSFLQKYGKFYLNGAGYTIFLAFIGVLFGAILGALLALMKLANSKILRGIAIAYIEYVRGTPLLVQIFIVYFGTGVLGLDLSKVAAGCIALSLNSGAYVAEIIRAGIQAVNKGQLEAARSLGMNQNQAMRYIIFPQAIKNILPALGNEFVTVIKESSVVSVIGVSELIFQAGNVQGASFKPFLPYLIVSLIYFVLTFTISRLLGVAERRMSTSD

SEQ ID NO: 5941 - protein, 217 aa, Enterococcus faecalis
IEAGEVVVIIGPSGSGKSTFLRCLNLLETPTGGSVEFEGKNLLDKNTNIDQLRQKMGMVFQNFNLFPHKNVLENLTISPVKVKKEAASEATEHALSLLEQVGLSDKKENYPSQLSGGQQQRVAIARALAMRPDVMLFDEPTSALDPEMVGEVLSVMKNLAIEGMTMVVVTHEMGFAKEVADRVIFMDAGIIQEEGTPEEIFDAPQNPRTQDFLRKVL

SEQ ID NO: 5942 - protein, 389 aa, Enterococcus faecalis
KGAPSMDRKNIATRYQQPTENLLMDIATLAKKTPNLIDLSIGDPDLITDERIIEQAANDAKNGHTKYTASDGSEAFIEAVIQFYQSHYQLSFQPNQVRATVGALHGMYLALQVILNPGDEVIIHEPYFSPYKDQVLLADGVPVFLPTYEEDGFQIDVALLKEKITPKTKAIILNSPNNPTGAVFSEETFREIAQVAIEHNLYILSDEVYEAFCFQETFTPMATFAPENTITFGSFSKAFAMTGWRIGYMIAPDYINEVAKLINEGVTYSAPTLSQQAGIYALQHFDEFVDPIVEVFQTRLEYVAQRVAKIPFLSLHPVKGSIYAFINIQKTGLTSVPFVEKLLKETQVLVIPGKAFGETTGDEYIRLAATQNLDLLKEAFDRIERMTFE

SEQ ID NO: 5943 - protein, 108 aa, Enterococcus faecalis
KGGKQMTEKLAVFTGKLAEAGVLNETQPLSMRLHLENIQAESDPESIVPLFSHGVILNILVEQLEESIPLSHLKKGTKVRFTVVGLPPMTMSIPPHVGGQAIELIEEI

SEQ ID NO: 5944 - protein, 287 aa, Enterococcus faecalis
KVGNRVNQKRVTLLLDLTLLVGIVLVVGTTIFMALGTNDFFVDLSCLLISVILIIVTYFVRITAGLTFSLIFIFLQLTYVVYQYVYHDLFSYGSLFWLIMPPLYCLTIYAVTYQIRTIEEENIRLRKETSRLNALDAVTNLRTAKMYEEGFDLFSDISTRYEAPLYLVVIQVAYWESIRNLLSPEQKNELLQIVTAAIKETTDDRFLPYFIDGTPPTWALLIFRDGDDGYTTRKEFKQQAQEKFTHSETLRNITLTLQVSYTKYDPAEFNNASEFLGDGINSLQYDV

SEQ ID NO: 5945 - protein, 585 aa, Enterococcus faecalis
KYDWYSKQKTIEIPLELIKETNTLTVEGQIINQAGNDMYNLIETPANWLTMYEGSNVNFQYDLQLPENTIHSFYNHFVGADTIANKHSVILTPENASEKELAAATHALAGAARLITTSEELLPMASLNKEQSAPYQLIIASYDKLPDQYKSQIDSKRVEDQAVLKFFNQPDKHVLVATSKDEDLLVRAGRYLANYELMTQTDKEETTVDENTDTFSSTLEFDGNYPLTSTGDKLEGAYHQEQTYFVNLPVDRNNANGSRVHLHFKYAENLDFDSSLVTVYANDKPIGSKKLTAARANGDELNLEFPKNLEIADSFVLKVAFDLNVKSPEVLRNGQTPWAFIENNSNAFIQTEELNDILFNNYPNIFIRSRSFADLAILLPEKMDDNYFKVLTNLFNLIGNYAESNVGEITYYKKAPKNAALENHNLIIFGTPKDNPMIRKLNDQLYFHYDKDFTRFVSNEKLSIEKDYGKQIGTAQLMFSPYNAKAAALILTGAKSQGVFLASTQVNTEKNTSMYKGDAIVVDPNYRRYDYRFKKRVSNVSNESLGKRIVNNHKLMIYLFVFLIGMTIIGLSAFFIVKKNLKGGE

SEQ ID NO: 5946 - protein, 126 aa, Enterococcus faecalis
IRRKRAMKQKTVTLIGLFFLAILIGVASPTVYAENKEQDNHTFTQPFQNKTISLTGTSVRSTMYFTKIDYWDVKKASFNMTYQITQLKNNQTSDLTVAVNGVKFYSWRPENTTGIQNKRRLKSLWN

SEQ ID NO: 5947 - protein, 424 aa, Enterococcus faecalis
GGRQMTIADIVMLTATIIIWSLLIVNILLVIFGYVYYLKTDPVAPPPVEDEDAPFVSIMVPAHNEGIVIVRTVEALLNFNYPQDRYEIIVINDNSSDNSAELLANVQKKAVNRNLQIINTDNITGGKGKSNALNIGFKQAKGDVIAIYDADNTPEPNALRYLVGELIASEEYGAVIGKFRTRNRNASLLTRFINIETLAFQWMAQAGRFQLFKLCTIPGTNFIVRRSIIEAIGGWDDKALAEDTEISFRIYMMGYKIKFQPKAVTWEQEPQTLSVWFRQRTRWVKGNIYVIVKNAKLLFNPKASRIRFDILYFLSIYFLLMTSLVLSDIMLVLSMSGYLTTTLQGFSNSLWLLAILLFIFSTFVSITTEKGEMTLENILIIALMYITYSQMWLVVAAYGMVMYIKENVFHKQTQTKWYKTERFK

SEQ ID NO: 5948 - protein, 529 aa, Enterococcus faecalis
RELKNKQYLIGWVCFLLFFVFCGFAKPALAAPSKHVLLVYDSLNIAGKKENDVDALQRVLTSFGVEVQSVAVSDYVPGELLNDGYDSLISMVNWPEQAGVIASDFLADRVHFKGKQLHIGRNMRDDEKQYFSGTWKELSHRQYRLEDEKNRFSQVLPFQDQSVVLENTQGQTVGRLKTQELAPEEYPFGVIENGHAFLPMFERKGAVFLESLDVISQWLESEKMSRPFLTISDFNPLRDMSVATYLQEELVKTTYPYILSSTSVSQNNTILPYKLFTNALRAFASTGVIFLETPVVNNVDLNDQRALKQLMEQQISLLVDRHVYPVGISAPGYWNQDLQYQEDGLAISDTVILRENPPIERVFYRNQTGESITYKNALFDLPYDYLSGIEWTDKDNPNDYRFPMPTTISFSFPNSKKEVDHLIQEVKEAPIVFSVSEADQHFTVQTQTQKIEFRNNRFFLNNQIVNGLADTGASTVEKQRFTGLFSFFFSITNNILIGVVTLTLIILIILFMIGRKNYRSKYINKEEDK

SEQ ID NO: 5949 - protein, 509 aa, Enterococcus faecalis
GESMEKIKKYMNSAFEWLSRYISPSLLAVLGIGLVTSILLFVYPINGLGDNGEYFRVLNSNSLYRVNGDSYDNVVYFVKDFSIMRYFNETTTHFVSTQQFFITVAIWLNKLFYSQTLFDIRFLGFVYLSCFLVSIYILVRGLTEDVSLKKSYLISLLVIFILGDTSYTIYFNSFYTEATSFLLSVSVLAFSVYFYRVTKPRTWLRRIVLVILAQAVVLLIGTTRQEYLLIIGVIIAGLGFFVYLSQRYQRLSMTAFLIALIGFTTLAAFIVPNDIYERDVYHSMTRGVMKDSKVPDKRMSEGGINPQYGLQKGRSYFEEYSPVSPTSEQMKKDFFDKTSFGWVLLNYLNYPSELWQGLNSAVPNVYLVKPNNVGNFEKTTGRAPLEQSKFFMVYNRIKASFFPKNFAFYLLLGVILFGLYGVGLYRGLKRNEPRLVFRFFLMTGIYLNLLVVFISTIIIDGDSDLVRHLFLVSVFLDFLLLQIVSDVIGKRMWQDTTPQVIGEVEGIEK

SEQ ID NO: 5950 - protein, 185 aa, Enterococcus faecalis
TQNHGVRQLLGVNIDLITLGYLYKEFGISADYLQYHYQLIDDGYISDDLPLYQTKFNHQTNKYENNGTLNIIESLLTIVHLSEVGMAKQTSIDFVRKQVQQGTLFNSYDLNGSPVDKNQSAASYAIAALIGVAENDKELYRAAITVLNNFQIMDSSSPIYGGFGDKVTKQVYSYNNLMALLAYDF

SEQ ID NO: 5951 - protein, 363 aa, Enterococcus faecalis
KSMQMRTERHILLNGEDNEEVIPKISKVFGIQNLSPSIGIEKEMPAIRAMVQEVVREVYTPGKTFKITAKRSDHSFELDSNGLNQELGGAVIEAIPEIQVQMKKPDINLRIEIRKDAAYLSYETIRGAGGLPVGTSGRGMLMLSGGIDSPVAGYLAMKRGVEVEAVHFASPPYTSEQALQKAKDLAEKLVPYVGTIQFIEVPFTEIQEEIKRVVPQGYLMTITRRLMLRLTDAIREMRKGLVIINGESLAQVASQTLQSMVAINEVTSTPIIRPVVSMDKTEIIEIAEKIDTFELAIQPFEDCCTIFAPPQPKTRPRLDKAQEYEARLDLEGLMARALEGLKITEISAETAKDKQEDEFADFL

SEQ ID NO: 5952 - protein, 70 aa, Enterococcus faecalis
IKWNEMELAIPSFLILLGMPLTYSISDGIALGFIFYPITMIASKRAKEVSPIMYGLFFVFVGFMWILNAQ

SEQ ID NO: 5953 - protein, 346 aa, Enterococcus faecalis
ILGGRNMKEKISSYFELEQLNTNMKREMLAGFTTFISMAYILFVNPTVLGASGMDEGAVFTATALASALGCILMGVLAKYPIATAPALGINAFFAYSVSVGMGIPWQTTLAGVFVASLIFILITIFKLRELIIDAIPADLKFAISGGIGLFIAFLGLSQGGLIVANDATLVGLGPLNVGSTWVTIVGLVVTAILLVRRVPGGIFIGMAISTIVGLATGVIPMPDKIISSAPSLEPTFLVALGHVKDINTIQMWVVVLTFLLVTFFDTAGTLVGLANQAGFMKDNKMPRVGKALAADSTAMLAGSLLGTSPVGAYVESSAGIAVGGRSGITAITTGILFIFSLLFSP

SEQ ID NO: 5954 - protein, 65 aa, Enterococcus faecalis
KTVNVICNYWRDGLKKVCALVCAFNQNYVYLTNYVLLQIPIVSSKMGLFVLNNIYSTKHVVSLIN

SEQ ID NO: 5955 - protein, 97 aa, Enterococcus faecalis
CGTYSDGHYSNSSYIVWLVLIGVYLMYYVMTIKLKLRLRYQWLASVIVLFSYFSISGYIDGGTADWTSYLIYFFISIGISGITILFPLGLKNSKRNM

SEQ ID NO: 5956 - protein, 113 aa, Enterococcus faecalis
LMNWGRIRALSSKVPDELWYSVILLFTVPMEGVPSYIRFIPVIGIVCSLLAYKFSQKKDLLVIISQLAILIFAFIALFYVRSLFWTILLTAWVVIELGTLLAYIKNKDLESKQ

SEQ ID NO: 5957 - protein, 80 aa, Enterococcus faecalis
SYIYNEIGGFFMLPIGIDFGTKDAILASAVLVILGMTVIFHWSVWEFVITEAMIILAFHAGGKKQDKRIEDKYKRMKKGD

SEQ ID NO: 5958 - protein, 117 aa, Enterococcus faecalis
HICSMTERSRKKEALEVKLELNNRSAVIISTVFILLNTAVWIKFFFFYNPYHGAFDLLWTLPIGLIGAIPSMYVKSVGLRIYFIVMNILLAFSFVLPWILLALLGSIEERIHQNGKD

SEQ ID NO: 5959 - protein, 96 aa, Enterococcus faecalis
GSKCFHCLSNFDIIKYKERLNDMKKIRDFCNQGEIYFKEMTKTKRFFIALVAVIIYMFVKSILHNVVGFWISIIIGVAILYSMLILLAHLFYDRKK

SEQ ID NO: 5960 - protein, 67 aa, Enterococcus faecalis
VKTGTVKSFNHKRGYGFIIAEDGSEIFVHQTGICMPGFRKLIEGQTVEYETAEHEGRTKAVNVTVIE

SEQ ID NO: 5961 - protein, 196 aa, Enterococcus faecalis
IRGAIKMIEINYDIPGKVELISELKEIFSGVDKVINDLEQEKSVLEKELETLENTKTFTVDNLKRKPEINRLLTENSHLLTQMKKEREELQQSCFTYFPNKVGDIDSQYRQAIEKQLEPVEQEIALLLKQLNEKAMFIKSVKVKANAIYNREIVDEGNKIIGVTRHNRSVIGISSYVSAPNLVERAMKYERGQLKS

SEQ ID NO: 5962 - protein, 72 aa, Enterococcus faecalis
KIMKEVRNMTAEDIKKVLEEFVDEEGQFDIDKASEALEELIKESLGDSMESDKEDKEDKPDPFKKIMSKYDK

SEQ ID NO: 5963 - protein, 81 aa, Enterococcus faecalis
GLPLRRGILMTEDKLFHLTDKSNINSIRKHGLVGVKKAKDFLRREYGTDHTLFNQQTYFILNTYGWRGYDLSCATFMFVKK

SEQ ID NO: 5964 - protein, 180 aa, Enterococcus faecalis
RGCVTSLLYERIRPEFHLTRWQYYEKARYELKGVELESAKIFFNGLKNLSESDRNILIDVYYRSKEYCKFNRQIGLYQSARPISDDAIAEQYGIAKKEVTKVRRQAIEHLAEEMRKIILAISTAFHLKIGKDLYLVRLINEGTYKEQFVLGNKSEAKVFSAEKEDTIRKFMQQGFEREPA

SEQ ID NO: 5965 - protein, 187 aa, Enterococcus faecalis
NLTNQTPKKAGTFGILKKSGKRGMLSMDPFDEIVIKNYLSFPLVLQKLLSIKKLRRIEFFSQNMATHIVFDELGMTTKGFRPDKEVEKLLLKLELIDKRIERTLFRQKHFERFWATLKPLEQQLLIRRFKYKEEVNCPQSLVESVLDEIEEIETAICFMENIELEEENELSDDVEENLERMCDFFAL

SEQ ID NO: 5966 - protein, 66 aa, Enterococcus faecalis
DKESSVMQVRIFQSGNINKLESELNDFLEENPYIKIKDIKQTGESYGDAEEILSLTTVSIWYEEEE

SEQ ID NO: 5967 - protein, 152 aa, Enterococcus faecalis
VTKRIKQKKTKKRGNLMLIISTEKEPNFKYEEITRNFLSNMLAFTRGHFTGDISHFSPIVLAEMKKAPNWLEEAAGGMQGVIVQSLLKDENFSSVEQLKGELGRLIRLYFALAKDNLTENQESLYIDLFDKFTFLLLCSDEFITYLDSQPKF

SEQ ID NO: 5968 - protein, 795 aa, Enterococcus faecalis
KLSIYVSKGFSKKMKMVEGISPFQYLVEYVPEKVTLGEQATKESIEPIKRKASYFLAGELIGKRSNDNLLRKELIAIDYDELEDRDFENFIKKIAEALKGISYILYPTIKNNVSDFGLRYRLVIDTDRSYTKEENDCLWQNTVNKIGMKADLASKTYSQVAGLPILNEFSSETLIVRQQANPLKVDEYLSVSEEQQTYKEEKIVRKELTKEVAIKMVEAYVENVGEKLLDRAYYLNPYMNIKYAFETGEIDFDTVQESLTLLALGNSDWATHNIEHFKRDTSPVKNGTPFVDFFGWAYNDPYEEFEGIVLEETQVLYSGNELKFALAERRKKELKKLKRSWEKSGGRGKPPTSLSTLQCGRILQEYIEFCLFDMEENTRLAMYQPKEGIYTQNETQIKRVIGWLEPKHNARAVNDVIFHIWKEAKIKPKTVSRYLIPVKNGVFNLKTKQLESFSPNYVFTSKIATSYAENPSLPKFNDWDVESWLNEIACGDAQITTLLWQVISDAINGNYSRKKSIWLMGDGSNGKGTYQQLLYNLIGPQNIATLKINQFSERFKLALLVEKVAVIGDDVGAGIYIDDSSEFNSVVTNETILIEVKNRMPYSARMYVTVIQSTNEMPKIRNKSNGTYRRLLIVPFNASFEGTKDDWRIKEEYINRKEVLEYVLHKAVNMDFERFIVPDVSKKLLEEYKQENDPLVDFKETVFKPLGINKIPFYMVYSQYKEFCNENNFKPLSKIKFSKQFTYLLGKNWANKNAKYSMNEIEKIKALGDFFNYEEPPEKGAAYKSLVRNDLKLIS

SEQ ID NO: 5969 - protein, 85 aa, Enterococcus faecalis
RRVRVMYTELHKDTITDELRDIKHLLFFLQETSASLQEHKINYEKGKKNSTTLLAYETSRRIDQMVTLQYLMEKKVNALAEMFNE

SEQ ID NO: 5970 - protein, 85 aa, Enterococcus faecalis
ADEKKRVLSRLRRTEGQIRGIQKMIDEEKECIDVITQLSAVRSSIDRVMGMIVAENLKHCFENPEKDPKEQEERLAQAINMIVKK

SEQ ID NO: 5971 - protein, 425 aa, Enterococcus faecalis
LVEEKKMTDKTKSSLAYWKKIVILLCMGWVTIWIYRSALSPVYPQIRASLNGNASDTALGSISSFYFLGYVVMQIPAGFLVDKIGKKRVLIPGFILFALAALMIAQAQTIGTIYLGSLLAGLGCGSFYGSAYSLTSQNIPQAKKSFATAIVNSGSAVGSGLGMILSSYLVAQKGLPWQVMMYISAFMIICMLVAFQVIIRNHKEDMALIQPTVVDEKDNGAVKEKVPFKKLFAPHMLFAYILYFGTCYAYYMIVTWLPNFLSTERGFQGAAIGLSSSLVAFASIPGALFFSRLADKYMHKKVQFIVVLEFLATAMLLLTVQVSNATLLLIALIMYGFLGKLAVEPIIISWLGENAPKIGIGTTLGVFNFFGMMSSVIAPALTGKISDTTGSKVMGFYIAVVILLIGTILFMLVNLKKRRADSSNK

SEQ ID NO: 5972 - protein, 82 aa, Enterococcus faecalis
VFKLKKKVGQRSLRKKRSAFVPCETLTKKMIGGGKENDRQDKKFVGLLEKNRYFTMYGLGNNLDLSFRAFSCLSTNSCVSKW

SEQ ID NO: 5973 - protein, 405 aa, Enterococcus faecalis
GITMYQQPNFVRRTIMTPGPVEAHPSVLRQMGQPILGQFDPEFLQIMDEVREMIKVPFATKNQQAFAIDGTSRSGLEAGLFALIEPGDKVLVPTYGRFAYLLGEICERARAEVIYLEKDWLAPFEQTTVIEAIKEHQPKIVAMVHGETANAQMQPLDQIGAFCRENEIFFVVDMVATYGGVETKVDDWKIDIAVAGTQKCVSVPSGLSLITYNQRVADYLAGRYQKELGLGADARNERFIQSNYLDLSQLEKYWGPERLNHHTEATTMIYGLHEGLRLLLQEGMENVYARHRKNNRILVESLQKMGLEIFGKLDTKTPTVIPVVIPEGIDGEKVRSLLLDHFKVEIASSFGDLKGKIWRVGNMGYSSREDNVLHFLSAFETVLKHQGYQFEGGSGSTHALAEYLN

SEQ ID NO: 5974 - protein, 547 aa, Enterococcus faecalis
KKEVVVMKILAEVLALPRFSDLQLLSSHSNLTQPLESVEITETPDVADFIPKNVMILTTAMIYKDDQEKLKPFIDSLKQAECTALGIKVGRFLDEISPEIVAYASAVDLPLIKIPSTQPLGGLLHEIVGYLRDSKTEQMSVAFDIQKRFSTLLMQDVDATRFIAEFAKILNAPIILLSPWQQVIAHSNYFYGNQKSAEFFIEQLSKDHFQQLAQEKKIFRLQDERQENIQVAGFPIRVNDYFPYYLLVLSPEQIPYPISEFAIDQAILVLTFMLFKNQKIAESFEHLKTDFLDRLLDTHQEALSKHQNWLELWKNYRLINSDYYQLAIVYGVTKPENETHIRYQQAEGQLIFQWLKEQLPEILPDVALFKLKNQNKSILIFQSKKNDHLMILQNLAERLQQALPITIRFALGNAYENLEDLPNSYIEASSTLEASLHAQKPATVQLFHPKGLAGLFEKIGTEDVEYFCQQQLKELAYPTEPTLQELRKTLKVFLDFNCEITKTANALYLHRNTIKYRMNQCEKLLGTSIQEPETSLLLRVALELSEK

SEQ ID NO: 5975 - protein, 268 aa, Enterococcus faecalis
DRKGRIVMGYKNNRVGYQKELLTSRAVIKKDNYAIIPHDGLVQNAVPGFENVDISILGSPKLGATFVDYIATFHKNGQQTTGFGGDGIQTLVYVIDGRLRVSDGQETHELEAGGYAYFTPEMKMYLANAQEADTEVFLYKKRYQPLAGHQPYKVVGSIHDQQPEEYEGMTDVLLWSLLPKEFDFDMNMHILSFEPGASHAYIETHVQEHGAYLISGQGMYNLDNEWYPVEKGDYIFMSAYVPQAAYAVGREEPLMYVYSKDANREPEL

SEQ ID NO: 5976 - protein, 425 aa, Enterococcus faecalis
RWLGKRLQSECNQSGGFVMDLEKVLKQRIEELSAIGSDPAGGMTRLLYTDSWLAAQKYVQSQTEAFGLETQFDEVGNLFCRVAGTEFPQETILTGSHIDTVVNGGTLDGQYGVIASMTAVQYLLDKYGKPRRSLEVLSMAEEEGSRFPTVFWGSKNVVGEAKREEVVDISDNEGKKFVDEMHRQGFDFRQEQTRREDIEAFVEIHIEQGNILENEKLQVGVVHSIVGQRRYTVNLKGQANHAGTTPMSYRHDAVYGFAKICAEAIDRANEIGDPLVLTFGKVIPKPNTVNVVPGEVEFTIDCRHTDAAFLRHFTGELEERMKTIAQELGLTIAIDRWMDEAPVPMNQAIVEVIEQKAKEGKYQYRMMHSGAGHDSQIIAPHYPTAMIFVPSIGGISHNPAEATAFPDLVEGVKLLADTLYELAYK

SEQ ID NO: 5977 - protein, 454 aa, Enterococcus faecalis
MQAELVIKNGLVILETGEVITDVAVQGGKIVAIGQDLSGERVIDATGLVVSPGMVDAHVHITDPGGGYRDEWEGYVTGTAACAKGGVTTFMEMPLNQIPATVDKTSLEIKYKAGENKLKVDVGSFGGVVPTNLADGIQELDEGGVSGYKCFLGTCGDRSIEGDFQNVDDYSLYEGMKQVAKTGKVLAIHAENAPITDKLGAVAYQNGETTLAAYVATRPVFTEVEAIQKAILFAKETGCRIHICHVACQEGVEEVLKAQAEGVDVTCETCTHYLYFTTDELDAIGPVVKCSPPIRDADQQAALWNHVQTGGIAFVTSDHSPCTPDLKDTTNAFEAWGGISGVQNNVDVLFDEAVQKRGLSLKQFADMIAANPADRYHLAQKGRISIGKDADFVLIKPNAPYILKAEDLEYRNKISPYIGREIGAQVIQTILRGETIYAQETGVTEAFNGVFIKN

SEQ ID NO: 5978 - protein, 503 aa, Enterococcus faecalis
KGEFVVEKNVSQVTAQEETALKARGYNEDLLPSSPKQRTMGARNFFTLWMGSIHNIPNYAAVGGFIFLGLSPLQVMLAVVLSSFIVATFMNLNGVAGSKYGIPFAMHLQSTYGSLGAKLPGFLKGCVAAIAWFGLQTFTGSLALLIILGKFWPNFLEIGGSFQFFGLRLPELMAFTLFWLLNVAIGFGGSKILNRFTAILSPLIYVVIIGLTIWAIRAGGGLTPILSYQVSGAIRSVNPLVAYLIIFNSVVAVWSAPGASVADFTKNARSTRAQVVGQTTGLVVGYGIFAFSSVVILLGGSLYFGIQEWNILNIIDRLDNVAVVVLAMSVFLLTTISTNATGNIIPAGYQLAALFPKKMTYKKGVMIASVISFLIMPWKLMENADSIFIFLNAIGAVLGPVAGVMIANYYFVQKQQIDLNALYVDKHKKEEANPFYGLNKPAYVATILALVLSLSGQFIPQVKIIADISWFVGFATGFVLYLVLKKWTWDSKKVKETAYQEGK

SEQ ID NO: 5979 - protein, 171 aa, Enterococcus faecalis
LMGEIKQLTIEDAPALQEISIETYTDTFGPYNTPENMQAYLVEAYNLEKLQKELANPHSDFYFIFVDNQLAGYMKLNRETAQTEPMGPEKLEVERLYILPAFKGKKLGTQLLELAEEKAREFGKKALWLGVWEHNDAARAFYKTIGYRYYSQHSFFMGDDEQTDFILLKEL

SEQ ID NO: 5980 - protein, 148 aa, Enterococcus faecalis
DILREIGMIARALDSISNIEFKELSLTRGQYLYLVRVCENPGIIQEKIAELIKVDRTTAARAIKRLEEQGFIYRQEDASNKKIKRIYATEKGKNVYPIIVRENQHSNQVALQGLSEVEISQLADYLVRMRKNVSEDWEFVKKGNTRNY

SEQ ID NO: 5981 - protein, 87 aa, Enterococcus faecalis
EEICLARKMDLRIWVEGTVVAAMAMALSFLPIEFANSGLDLSLGMVPLVLYSFRRGLLPGVAAGFVWGMLNIILRYSHENPQPRVMG

SEQ ID NO: 5982 - protein, 65 aa, Enterococcus faecalis
YLTCPKQSLLQLQEATHDETNKELMGPFPTIGPSHYWQIQSVKKRGPLPLLRRLFLLPKYVNPFF

SEQ ID NO: 5983 - protein, 223 aa, Enterococcus faecalis
EIKYNKMIKRKEGCLMKKILYGALTGFALFLVAGCTPKTPTAVSSTNEQKETAISTSETSSSVQQEATTTSEKTSAVAVSLEKVTTAFEKKYPEAKITSLQLDTDFGRYFYEIEGVDQQKEYQVEVNAETGEFTKEKVETLDADEQNGVKMQEEALDLTNIISREQATTLAEKAAKVGQATDWKLEKELGITYWEVKVKEGQQKIEVKIDAHSGKILTTERDD

SEQ ID NO: 5984 - protein, 266 aa, Enterococcus faecalis
RGDGNLLDLIYVHIDVTSNAVLSKGITHSDFVRSIVHHPQNLLLLDPSAEAGEYDMHSGLKIIRGEESVNRYFQSLQRRWMTEEIKWIDFSDVTMLKELTPLEISELLYFGHMKNSLHSPFFYKLQNDFVFFEFADQMTRVYYRYIDEFYRIFADKITRVVLEKVNQKKAFFKRNTPVEKLSPELLKNMKGILQEGVIFCFQQTEVDKEEYRIPIYLVEDSLSKMKNTSYQKEEILATLVYNSEKRIWHIEQENDFGEIFMLAHEG

SEQ ID NO: 5985 - protein, 251 aa, Enterococcus faecalis
YIKRKENMRPKEKKRGKNWLINSLLVLLFIIGLALIFNNQIRSWVVQQNSRSYAVSKLKPADVKKNMARETTFDFDSVESLSTEAVMKAQFENKNLPVIGAIAIPSVEINLPIFKGLSNVALLTGAGTMKEDQVMGKNNYALASHRTEDGVSLFSPLERTKKDELIYITDLSTVYTYKITSVEKIEPTRVELIDDVPGQNMITLITCGDLQATTRIAVQGTLAATTPIKDANDDMLKAFQLEQKTLADWVA

SEQ ID NO: 5986 - protein, 60 aa, Enterococcus faecalis
RRQRRYVEGFPIGAKNFSRLGGLIKKSLKSFDTFQGFFALFHHLAFLLFQTSKTITNTCK

SEQ ID NO: 5987 - protein, 100 aa, Enterococcus faecalis
YFLFPLGTIVLTNCSGKKRREGSKMNSSYLSYVFELSLYYLLLIMSLPLVYAVTYHLSFSSMYTSEWLIISVFLSPLVLLFAGIRYGFARLKQQERQVMK

SEQ ID NO: 5988 - protein, 158 aa, Enterococcus faecalis
NVVVTVLFVCLGNICRSPMAEAIFRQKVQQAGLESTIQVFSAATSHWEVGSQPHKGTRKILEQQGISYQGMRATQIQPSDFKKYDYIIGMDTNNVADLKALAPQEEQPRIHLFMEVVAGKETMDVPDPYYTGDFEETYRLVEAGTSEWLKKIKAQLKD

SEQ ID NO: 5989 - protein, 200 aa, Enterococcus faecalis
RYIHIRSGGISMSGTHDTKQAIASALIELCEQKDFRKISVQDITKKVGLNRQTFYYHFTDKYDLLRWIYRHDALIYLETDICLENWEEQALKLLKAIKEKSHFYYTTVTSDSEVLLNVFSASTNRLFISLFEQVDVENHLTDKDKQFYANFFSYGCSGVLTKWILEEYPQTPLEMATQLFRLAKDTEFMAYHLYEQEANE

SEQ ID NO: 5990 - protein, 497 aa, Enterococcus faecalis
IIKKLNKKGFSEDNRLKKSVLSALMVCSITLTSVALPSAAFADEYDTKIQQQDQKINALTSQMSDAEAKVAAIENDMVETAKQIDTLTAKKNKLSSEVSKLYSEISDLNVRIQKREVQMTKQARDVQVNGQSDSIIDAVLDADSVADAIGRVQAVSTMMSANNELLEQQKEDKATVEKKTKNVEKQIAELEAATKELNDKTESLKTLKIQQEVAKNDLEAQRSEEQGKKDGFIKQKKEAEKRLAEEQARQRAAAKKAEEQAAAQAQAAAQKAAAEQAKATKAANEAAASAAEEKAATPVVESSTTTESTTTQETTTSSTETESVVTTPVAAAPEKEKEVPVTNPTTPEKGNEAKPGNGGVTSGKQAAINAALADVGNSYATGWNQPGECLVSVRRWLAAGGINFGYGGPNSGYVASGATQVSWSNVQPGDVVQYESAYSPDSWIGGVHTVLVTGVSGGSVQIVEANNPGGSGYVSSNSNWSPAPPAGFRAVVWRFPG

SEQ ID NO: 5991 - protein, 65 aa, Enterococcus faecalis
TDCGTDSSGLSFSRCQPDFIYYACVGPYIAIEHGVVCYFILSTEKTVFRKIKIENFVRLRKMLIC

SEQ ID NO: 5992 - protein, 195 aa, Enterococcus faecalis
SVCETLCGCLWYLRCDGREKIGRGKRMIRKEYLKYVTPILLFFLMLIDAHLTKSFETWTSNVYFASSHLLLLAFMFAVPNFSKRYLLITSLILGFICDSYYIGIIGIYTVALTISVMLMYTFKEVIQTNLLTGFFGIVIFTTLYELIAVLIQVAFHLADVSPILFITRVLGPTLLLNMVWYVILSYPLKKLFSVK

SEQ ID NO: 5993 - protein, 304 aa, Enterococcus faecalis
SISGKINTISLKNIWGVFVKKFNPNKNIIITLILVIILVTIISLTAAQRSEKGKTNVVQGGVNNSVSMVDRVISFPARVVENGLSSMGNLINTFKENERLKEKIDSYNELAVQNNNYKREIDSLKQELNLNETLANYEKVTANVITRSPDTWQDLLIIDKGTNDGIEAGMAVMAQKGLVGRVIEVNATTAKVELLTSKNVNSNHFPVRVTSANGESFGLLKNYDNKTNALIVSQLTGDATLKEGDVVQTSGLGGNSPADLAVGTVIKVKPDSFGLDREVYVKPYADVYGISVVTVVKRSAGESE

SEQ ID NO: 5994 - protein, 708 aa, Enterococcus faecalis
RRRIMTEKQVFKTTWGGRPLEVEIGQLAKQANGAVLVRYGDTVVLSAAVASKEAKDVDFFPLTVNYEEKMYAVGKIPGGFIKREGRPSERATLTARLIDRPIRPMFSQSFRNEVQITNIVMSVEQDCTPEMAAMFGSSLALAISDIPFDGPIAGVDVGRINGEYVLNPTVEQAEQTDIELTVAGTKEAINMVESGAKEVSEEDMLGALLFGFDAIKELVAFQEEIVAAVGKPKMDVDLLQVDADLKKEIFDAYYNTMKTAVMTEEKLAREVEIDKVKDTVKEVYAEKFSEHEEEAQLLKEVKQIAEDLEKDVVRELITIDKIRPDGRKLDEIRHLSSEVSILPRVHGSGLFTRGQTQALSVCTLAPLGEHQIIDGLGVQDSKRFIHHYNFPQFSVGSTGRAGSPGRREIGHGALGERALAQIIPSEEDFPYTIRLVAEVLESNGSSSQASICAGTLALMDAGVPIKAPVAGIAMGLVSDGENYTILTDIQGLEDHLGDMDFKVAGTKDGITALQMDIKIQGITEQILTEALDQAKKARMEILEELTTTIAAPREELSQYAPKIEMIQIKPAKIKDVIGKGGETINSIIDETGVKIDIDQDGNVSIASSDAEMIKKAIKIIEELTKEVEVGQVYLAKVVRIEKFGAFVNLIKGKDGLIHISQLANERVNNVEDVVKLGDEVLVKVTEIDKQGRVNVSRKALLNEENKEK

SEQ ID NO: 5995 - protein, 121 aa, Enterococcus faecalis
  MISC_FEATURE (35)..(35): Amino acid 35 is Xaa wherein Xaa = any amino acid.
GLCGNTPLSTCLGESPTFHSVIRRLLEKEVGQMAXSPERKNEIIKEYARHEGDTVSPEVQIAFLTEDINQLNEHARTHKKDHHSYRGLMKKIGHRRNLLAYLRKTDIQRYRELIQRLGLRR

SEQ ID NO: 5996 - protein, 271 aa, Enterococcus faecalis
  MISC_FEATURE (260)..(260): Amino acid 260 is Xaa wherein Xaa = any amino acid.
SPTPGWTLITTAIEHPAVLRTMEYLETLGFEVTYLPVNENGQISMDQFKKSLREETILVSMMYGNNEIGNRLPIAEVGAILKNHSAIFHTDAVQAYGSEVILPHELGIDLLSISAHKINGPKGVGFLFKSDAIQLPPLLHGGEQEEKRRAGTENLAGIIGMGTAVSLLTSAEKQARKTAYQSFQTIILKALEEANIDFSINGEPTNRLAHVLNLHLKGIPSDLLLMHLDLRGIAISTGSACTAGNCGFFARVDSDVWEKXPQLLKKSIRDE

SEQ ID NO: 5997 - protein, 255 aa, Enterococcus faecalis
FNPWWRDQSRSKLAQQAQLALLYEVTCLNKPGLVDPVDAGAHQDMDVFTFLESSVVLTPYFETFVQAGTELRHLPIEATFRTIRQVGLEAERAMFEATEGINTHKGAIFSLGIFLAVCGRLMIWETPCTLQLFQQTLQTMTQDLLADFENLATNELEKLTWGERLFVQHGLTGIRGEAQQGYPAVFEQGVPYYQKHQGTQQQKLIDTLLYLSLYVEDTNLIKRSQNVQIFEVYQPLIQEYFAFRGDTNVTGNPFA

SEQ ID NO: 5998 - protein, 62 aa, Enterococcus faecalis
TNEIKLADALIKKIVTTLIWSVILTLYAYGKVSREFKKAIDKYHETQYILLRNHSYQSIQIR

SEQ ID NO: 5999 - protein, 1747 aa, Enterococcus faecalis
GKLMILVFIVYFKEKRDDQMKKKIVEDFNRKSQHKKWTKRKMLNLAISSGLLFTSLAIPVSIAVTSGTISASAAVLDIELLSNVTSNNDSGTSTSNRWTAANQNQPVNFTVSGGALADASAVFSGQKQAVLVVPPELRGNVAAAGSAAINTNVTIDLSKVTFLTAVLNAANDLTNVITQITSGALGNLTGVDIDLTEVNRQLELVNNIENLGAASFTAPETLAADGSYISAPISDGLGLVLAQNVSNILQDLNAAVQALEAKGTSIPSNLVAAAINAALLPVKGTVNVAVSGALPLLAVGGSGVNELVDASLLGTTTVTLPTTVSTPQNLSNNLDARFVGTVVQTDLLDVNLLATADGVSNIYFAAGTTSEVTAPTITGVTGNSTAGYEVKGTADANATVEIRNAGGTVIGTGTADGTGAFTVTVPAGEAGANETLTAVAKNASGTESTPTTFQTPADEATVTAPTITGVTGNSTAGYEVKGTADANATVEIRNAGGTVIGTGTADGTGAFTVTVPAGEAGANETLTAVAKNASGTESTPTTFQTPADEATVTAPTITGVTGNSTAGYEVKGTADANATVEIRNAGGTVIGTGTADGTGAFTVTVPAGEAGANETLTAVAKNASGTESTPTTFQTPADEATVTAPTITGVTGNSTAGYEVKGTADANATVEIRNAGGAVIGTGTADGTGAFTVTIPAGEAGANETLTAVAKNASGTESTPTTFQTPADPNTPVATPIVETVTGSTTKGYEVKGTAEVGTTIEVRDAAGTVLGTATTGTDGKYTVTLDSGTATANQTLSVVAKNASGTESQPATATTPADVTAPTVDNITGNSGSGYEITGTADPNTTIEVRDPSGAVIGTGTSDANGDFTVTLPTGTTNPGDTLTVIGKDNAGNESQPTEVLVPADATVTAPTVTGVTGNSVAGYQVTGTADPNATIEIRDADGNVIATGTADGTGSFAVNLPAGTANANETLTALAKDPAGNTSTPTTFQTPADEVVAPPSVDKVTGNTTQGYQVTGTAELGTTIEVRATDGTVLGTATTGPTGQYTVTLASGKATAKQTVNVVAKNDTGLESQPTTAMTPADVTTPTIGDITGDSTTGYEITGTADPNTTIEVRNPDGTIIGTTTTDDQGNFTVDLPAGAANPGDTLTVVGKDGDGNESQPTEVTVPEDATVAAPTVTTVTGTTATGYQVTGTAEPNVTIEIHNEAGLVIATGTTDGAGAFTITLPTGTATANEALTAIAKDAAGKESNPTAFKTPADPDAPVATPTVDKITGSTTNGYQVVGAAEVGTTVEVRDADGTVLGMATTGTDGKYTVTLEPGKASANETITVVAKNATGKESQPATATTPVDLATPTIDSITGNSSKGYEITGTAEPKTTIDVRDADGTIIAATTANETGQYTVTLPAGVVTPGETITIISKDGAGNESQPATAVIPADVVLAAPTITKVEGNKANGYTVTGTADPNVTVQFYNSSEQLLASGNTTTGGTFSVHIAAGLATEKETLTALTTDTQGNVSPKTTFMTPADITGEPEIKIAAPTVSSVLGTSKAGYLIKGTAEPNRIIQISNRLLRSVIAVGATDAEGNFAIQLTAGQATAQQSLLATATDGAGHYSTATTFMTPADPTNPGGGNGNTGGNNGNTGGNTGNNGATGGNNGNGSNTGSNPNGGSGLGTTGSGLGSLGNGLGTNGSGYHPKLSTISYGTGNHGKTGYLPSTGEKESSAVTTSLFGAFVALLASMGIIKRKRKN

SEQ ID NO: 6000 - protein, 365 aa, Enterococcus faecalis
SRGERRVSILKTVTRLQMSVNAKGDVGRGAMKLTIKEIADMAGVSVTTVSQILNNKGSRFSEKTRNKVLAVVAENHYKPHYFASNVINRHSKTIGMIVPDVTDFFFSKVIEGVQTYLNSLGYMILLCNSKHDSDQAMQYVIELIHRSVDGIIYATPNVLPQNHIVKDRREHPIPVILVDRGINPRDSGRLIVKEYEGAYQAVHHLIQQGHQHIGMLRESAGYYRLTERVTAYQHALQDNNLPFRPHYVCAGELNLHGGYAAAKEVLKNEEITAIFCGNDEMAMGAYQAIEEAGKKIPDDISVVGFDGLEISEYLVPSLTTVYQPSFDIGYYAAKFLVEAIADPTGKVPNKVFDATFIARKSTKPI

SEQ ID NO: 6001 - protein, 487 aa, Enterococcus faecalis
KKHKTDLKNSLEIECSCRLRFHKKKIIVNWFTKWFKAERFCCIIHYREIGGNEFMRMVNIIEKKRDGHQLTSEEIQFIINGYTDGSIPDYQVSAFLMAVFYQDMTDEEITQMTLAMVHSGEIVDLSSIEGIKVDKHSTGGVGDTTTLILAPLVASVGVNVAKMSGRGLGYTGGTLDKLEAIPGFKVELTEERFIQLVNDTKVAVIGQSGDLAPADKKLYALRDVTATVDSIPLIASSIMSKKIAAGADAIVLDVTTGEGAFMKDLASARRLAETMVRIGKLANRQTMAVISDMSQPLGEAIGNSLEIVEAIETLQGNGPEDLVEMCYVLGSQMVVLAKKAETLDEARALLEEALTSGRALAKFKEMIENQGGDSSVVDQPEKLLTATYQFDLPAKETGVVQKIVANEIGVAAMLLGAGRATKEDTIDFAVGLKLHKKVGSPVEKGESLLTIYANREDVTEVEQLLYKNIEIGPTGEEPILIHDIITE

SEQ ID NO: 6002 - protein, 229 aa, Enterococcus faecalis
NKKKRGILIMELNRMIDHTILKPEATEAAVQKIIDEAKEYNFFSVCINPCWVAFASEQLADTDVAVCTVIGFPLGANTPEVKAYEAADAIKNGANEVDMVINIGALKSQQYDYVRQDIQGVVDAAKGKALVKVIIETALLTDEEKVKACELAKEAGADFVKTSTGFSTGGAKVADIRLMRETVGPDMGVKASGGVHNAEEALAMIEAGATRIGASTGVAIVSGATGEGY

SEQ ID NO: 6003 - protein, 155 aa, Enterococcus faecalis
QLFLAQLAKGINSYFKLNEGVAKKMTVKQEWLDCAVEALAHAYVPYSNFPVGACLVTADGKMYQGVNIENASFGLTNCAERTAIFKAISEDERTFQHLVVAGNTEAPISPCGACRQVMAEFFDPQMPVTLVGKDGATKTMTVEALLPYSFTDKDF

SEQ ID NO: 6004 - protein, 362 aa, Enterococcus faecalis
GAFRKVKQAKFLGLGLAAVALTIGLAACGGNSKKNANTKGDPQHSVVMVTDTAGIDDKSFNQSAWEGMQEWGKEHKLPEGPQGYAYIQSNEASDYTSNIDQAISSQFKTIFGIGYLLKNAVVDAADANPETNFVLIDDTVNGKNNVASATFRDNESAYLAGVAAANTTKTNKVGFIGGVEGPVIGRFQAGFEKGVADAGKKLGKDIQITSTYAGTFADASKGRALASSMYQAGADIIYHAAATTGQGIFQEAKALNETGSKDKVWVIGVDRDQNEDGKYTTKDGKDDNLTLASTIKGVNIAVKKISDLALEDKFPGGEHLTYGLKDGGVDLTTEALSDQAKTAVKEAKEQIISGDVKVPDQP

SEQ ID NO: 6005 - protein, 375 aa, Enterococcus faecalis
LFKYIKLFLGGFTEMKKAKLFGFSLIALGLSVSLAACGGGKGKTAESGGGKGDAAHSAVIITDTGGVDDKSFNQSSWEGLQAWGKEHDLPEGSKGYAYIQSNDAADYTTNIDQAVSSKFNTIFGIGYLLKDAISSAADANPDTNFVLIDDQIDGKKNVVSATFRDNEAAYLAGVAAANETKTNKVGFVGGEEGVVIDRFQAGFEKGVADAAKELGKEITVDTKYAASFADPAKGKALAAAMYQNGVDIIFHASGATGQGVFQEAKDLNESGSGDKVWVIGVDRDQDADGKYKTKDGKEDNFTLTSTLKGVGTAVQDIANRALEDKFPGGEHLVYGLKDGGVDLTDGYLNDKTKEAVKTAKDKVISGDVKVPEKPE

SEQ ID NO: 6006 - protein, 523 aa, Enterococcus faecalis
TLSQEENVIEMRKITKEFGTFKANDQIDLQVKPGEIHALLGENGAGKSTLMNILSGLLEPTSGEIYMNGEKVNITSPTAANRLGIGMVHQHFMLVEAFTVTENIILGSEPTHGGILDRKKAKKEIEEVSKQYGLDVNPNAYIRDISVGMQQRVEILKTLYRGANVLIFDEPTAVLTPQEIDELMIILKELTDEGKSIILITHKLDEIKKVADRCTVIRRGQSIGTVNVKDVSSQQLADMMVGRSVSFKTEKKPAQPKETILSIKDLVVKESRGLDAVKNLSLDVRAGEVVGIAGIDGNGQTELIQALAGLTKVENGSIHLNEKEITNRKPREITEMGVAHVPEDRHKYGLVLEMTLAENIGLQTYYQKPYSSTGILNYRMINKHARELIEEYDVRTPNELVPARALSGGNQQKAIIAREVDRDPDLLIVSQPTRGLDVGAIEYIHRRLIEQRDKNKAVLLVSFELDEILNVSDRIAVIHAGEIVGIVDPKETTENELGLLMAGYSLEEARAELSKVEAGETVE

SEQ ID NO: 6007 - protein, 382 aa, Enterococcus faecalis
  MISC_FEATURE (296)..(345): Amino acids 296 & 345 are Xaa wherein Xaa = any amino acid.
RQVKLLNNRSEKIRNILVPVLSVIMGFLLGAIIMVIFGYDPVAGYQAMFETAFQGKKSIGEIFVTAAPLIFTALGFSVANSAGFFNIGLSGQALCGWVASIWVALSMPDAPRMIALPVAIIVGAVAGALAAAIPGFLRAYFGTSEVIVTIMLNYILLYTGNHIANNVMKPSIMANKGITKMIGANASLRSPFLTSISDGSRLNIGIFLAFIFLILVWFLMKKTTLGFEIRSVGLNPFASEYAGMSSKRTIILSMMISGTLAGLGGAVQGLGTFQNFFIQNTSLSIGFDGMAVSLLXAGSSIGILLSALLFGMFKLGGQGMPLIAGVPTELVDVVIAAIIFFVGIXYLIRFLLAKASGNKKEIAIVETIEAAPDKNNQEGGDI

SEQ ID NO: 6008 - protein, 331 aa, Enterococcus faecalis
SGARQKQSRGGRHLMDLATISSIITQTLVYATPLILTALGGTFSERSGVVNVGLEGIMVMGAFSSVVFNLTFADTFGAATPWIACLVGGVVGIVFSLLHAVATINLRADHIISGTVINLMAPALGVFLVKVIYQKGQTDMITQSFGYFSFPGLSKIPVIGELFFAKTSLPAFVAILIAILAWFVIYKTRFGLRLRSVGEHPQAADTLGINVYLMRYSGVLLSGFLGGMGGAVFAQSIAGRFGITTIAGQGFISMAAMIFGKWNPLGAMGAALFFGFAQNLSIAGENLPIISEIPKVYLQAAPYVLTILVLVVFFGKSSGPKANGKNYVKTK

SEQ ID NO: 6009 - protein, 68 aa, Enterococcus faecalis
TCLVFFKISTLPSNCKEQLKEKRKVTFINSLFYSEAVPNAACVQLIILRKEMAPRRFDGGPISFLISF

SEQ ID NO: 6010 - protein, 223 aa, Enterococcus faecalis
QLFFKNRWFFCYTFVCSKHRKSGGRSMNKTRVEAFSDAVIAIIMTIMILEIKTPQVGVLAGLIENIPYFLSFIVSFIFICIAWYNHHYIMSVTHWFSKKAFWANNFWLFSMAFIPVATAWVSEFWWMRAPVYFYLVVYTVWDFAYFLLTRIIYEDNVVKDPQGAAKLRKSKSYSKATKIIHLCLFAIGYIGIYFYPPIGIGVILSEAVIWYLNVPKEGDRLEC

SEQ ID NO: 6011 - protein, 406 aa, Enterococcus faecalis
RKIIVILDVFTTLEEEASVFKRVHLIVLDSVGIGEAPDAEKFGDVGSDTLGHIAKEAGLTIPHLEKLGLGTIAPLTGVKAVADHDGYATKLEEISVGKDTMTGHWEIMGLNIKKPFRVFPNGFPEELLKQIEDFSGRKVVCNKPYSGTAVIDDYGEHQMKTGDLIVYTSADPVLQIAAHEDIIPLEELYKICQYVRDITKDEPYMIGRIIARPYVGEPGNFTRTSNRHDYALDPFGHTVLDSLKENGNDVIAVGKINDIFNGQGITEAIRTKSNMDGVDQLLTVMNKEFTGLSFTNLVDFDALYGHRRDVKGYAKAIEDFDGRLPEIMAAMAEDDLLLITADHGNDPTFPGTDHTREYVPLLAYSKKMTKQGSLPQGFYSDISATIAENFEVPATENGQSFLNQLQ

SEQ ID NO: 6012 - protein, 282 aa, Enterococcus faecalis
INYNNSRRQHMTTLTNHLNETTEFLKEKGVQQADFGLILGSGLGELANEITDAIAIPFSEIPHFSVSTVVGHAGQLVYGTLSGKKVLAMQGRFHYYEGHSMQTVTYPVRVMAALGIHSMIVTNAAGGVNETYTPGNLMLINDHINFTGDNPLIGENDEEIGPRFPDMSHAYTQEYREVAKKVAAEQNIDLKEGVYMGFSGPTYETPAEIRMSRTMGADAVGMSTVSEVIVAVHSGMKVLGISCITNLAAGMQSSLNHAEVVETTERVKGQFKELVKATLAAL

SEQ ID NO: 6013 - protein, 237 aa, Enterococcus faecalis
TRMSVHIEAKPGEIADKILLPGDPLRAKYIAETFLENPVCYNQVRGMLGYTGTYKGQRVSVQGTGMGMPSAGIYAHELINSYDVKKLIRVGTCGSISEKVNVRELVIAQAAATLFSAIRNDFPKYDFPQIASFDLLLKSYEIAKAKGFTTHVGNVLSDDVFYKDSLDDVFRLGRYGVLAIEMEAAMLYYLAAKFDVEALAIMTVSDSLVTGEETTAEERQTTFNEMIEVGLETAIAN

SEQ ID NO: 6014 - protein, 301 aa, Enterococcus faecalis
ATRGEDWLLLAACGNTNKEANNADKTHEVTDTLGNKVTVPAKPKRIIASYLEDYLVALGEKPVAQWTVGQGSIQDYLAKELKDVPTISYDLPYEAVLKFEPDLLLISSSALVEGGKYKEYSKIAPTYVVKNGENVTWRDQLEDIATVLDKKEQAKKVLEDYDTLTKGVQEYLGKKDAGKSAAVLWVTNNQVFMVSDNRSSGTVLYQDLGLQVPKLVEEISKNATADWNQVSLEKLAELDADHIFLVNSDESAPLFQEAIWKNLPAVKNNQVHTYDKKSSWLYNGPIANTQIVEDVKKALLN

SEQ ID NO: 6015 - protein, 334 aa, Enterococcus faecalis
EMIKMTLNGIDISSWQSNINVCKEGVSADFVIIKATGGTGYINPDCDRAFQQAISSGKKVAVYHFANEVGLEGTAEQEAEFFLKNIKGYIGKAVLVLDWESTNKGDVPWAKRWLDYVQSKTGVKPMFYTYTNVLQSYNFSSIAKADYGLWLADYGANNPQGYSQPTPPSVPYWNFISMYQYTSNGQLPGWNGRLDLNVFFGDRNMWDKYANPKSNPTPAPPVPPKPKRRYGYRVDDLQFVNGIWQVRNDVLGQPDFDWTENGINVAYIDKINPATGENTPDQELKVGDYFAFQPSSVGIITEQYSLNGKTISHVQFPDEFIWLYTESVEKLIYG

SEQ ID NO: 6016 - protein, 79 aa, Enterococcus faecalis
RKNTRFRTEGQIMDFSKIELMPLVVLGCLAVGFVIKNTNILKDKYNQFIPLIVFILGILISWWIQGKITPENTTYGALI

SEQ ID NO: 6017 - protein, 88 aa, Enterococcus faecalis
VGENMSIGEIITIITFVGGIIGFLIKNYTLLQKLDETVNKLNLLIDQTKEKQGLVEDEVIKLNEQIKSLWNNLKENNERIRDLERRDK

SEQ ID NO: 6018 - protein, 147 aa, Enterococcus faecalis
CRVWRKCNMDKIKIWITVDENQMVTDYSLTAKKNYIEIEVSEEPKDYLNWGLRNGKLVHYPDDLNDLTNNRTTSFVGNVMLSFAVISWALSYIPLIGKIILDYPKYADIKDEYDLLGLTDDNMKTFVSYKRITEKQYEEITGNSYKK

SEQ ID NO: 6019 - protein, 399 aa, Enterococcus faecalis
KGLLPMRVRSFCSDCGNIGFGPCESDVSICSFERVDELPAIEAAEECTAYILPNNSAHVLSFDKKSFVDFKGPKGDKGDIGPQGPKGDKGDIGPRGPEGLQGDIGPQGLKGEKGGNGPQGPKGEQGPVGPQGPKGDKGDIGPQGPKGDTPDVSDFIKRKEAEKGLFVVRNTDVLTQNWNDFVEPGMYSVWKPSGENMPPNATYGDLVVFATNGTVTQLYSYNGKWQMRTKQGSPGSWTTWKEIGQQGPQGEKGDTGPTGPQGPKGDTPDISNLVTKTQHTNDLNKKIDKTAFNAVGQHISYNGITIHIQKSNTIITCNVEGIFKKGKANGWHEVSTRAETSYRPVNMIIKVPLTINIGNTIQINKYAALQIETSGRIMIRVYGLQNDNVEFGGSATWIR

SEQ ID NO: 6020 - protein, 166 aa, Enterococcus faecalis
GVAIMAENKQASEGLAEDLIRSMVQTASIELHLKTLVEKRQSEMDNGLIDTNDFNRVNEQIDVLKNLKEELFEVTEQRRQDMRTLFDLFEGKGDKEQWCIVKHAAMAMYTAFEAWQASDNDRLLYQICIEKNAYFIKKITQFTGVPITECASCFSDMMKGAIADEG

SEQ ID NO: 6021 - protein, 231 aa, Enterococcus faecalis
TMMNYDDALIKVAERTQNNRKQNRQDTMQRRHQVTEIYGQEYTAQGDSNTPAIVYLPVSKDLVYHEVMELQIRISGFEMPVKGGETTNASLKLTNTRLEVGSTNIPPNNHSHSLSPNPHTHELNPNPHSHNLSAGIQTFPSTATEFRLEISGVDITDAIKLEYPSNWIDGNGVFPKSDDGLLHYNLLGILPHLQPWQQNVILSSGLKEIKIYGNGVFKATVAEFFKFSHRN

SEQ ID NO: 6022 - protein, 859 aa, Enterococcus faecalis
PMPSHDASIQWFEARKGKVVYSMSARLGPNSYDCSSAVYLSLIAGGFLPSGSMGNTETLFGSLESIGWKQTPTPKRGDIFIWGVRGASDGAGGHTGMFIDGSSVIHCNYGANGISIDNYQFILNNNGGMPSVIYTDPKNDGGNNPTPPPKRVLSKEQQVAVDIRNVLSKEGYTIQAIAAICGNADVECGMRPDISEIGGGGGYGVVQWTSPNAWESGANYVQRLLREAGIDGDYKMASTQAKLIHYGMFHGQWIGVVSLTDAKEFIKGTNVDQLTIAFLKNFERAGVEKTQARITAAKKWFDFLLNYKEGDYDDPTPENTKEKLRNVGEIDQLGIKNGKVFVKGWHFSSDLPIENIEIYNAETAKLIYQFNNIPIKIRNDIKEKYPNVQDVEKSGFELSFTLKANEAIFIKGIRTDGQEKEELYFDNLLMFEPVENAPVDNYAEDNRKFFFEIFEKGKLVARGNKILNTLSWGNELMYVPTTSLVLPITYREYFKGREEVKIYINNKVFHGITSDYDVDKEFETITIQLDHIISEWEFRQVSTNLACKNRTINDIFSTLDFRYSNKWHLDYLQNSSQKRIDYVYSRQNKLEALTKTCELTDDIWWRVGFNFGRKLEFGTFGETKPVQISAVRNAPYRLISEPKIDYQFDQVINMATVYGEKSDSGMSSMSLREVYLEPHTQIKGFPVRILRKGINNERGYDYINLAKIASNNNVEYTVIDEQSVRDESNISIEASYSFNDLAPFAVNDKKISDEDRHQATRTAYETAVKRLKQARRKYYIDITTTELPSDINVGDQIRLLYDNNKLITEGCSEYQKEIMKMSDWYYILKIEYNFDETGLETNRLTLSKNLSIERKADER

SEQ ID NO: 6023 - protein, 263 aa, Enterococcus faecalis
NYVLERMIYMSKNCKSCKDLKNRGIDVDCCFEIGDKECASLGDDKGFNGKKNDCQDMHDLNDCLLGRADSALDIHDDCDWKGYLKKLVSTLYNLQKMTICAICGIWIKIHELYKLIENLKQFTPYFRRINRVGTGIWGESSHITNFNKTKIIMKNKAANQWEEHVTIEGQASLITSGIKAGATVELTLDGSLFDSGDSYEPNVVIPVVFSNVRRDMTTFNAILLYHIPSDKWYVKNTSGTDIPLDYGFRFSLTYQQGNVKPGE

SEQ ID NO: 6024 - protein, 376 aa, Enterococcus faecalis
EECKLMYDCRTIYPQKRYLQFRDVVIGAYDMIQDADLSGGFKTTTQAFSFGYGSYTNAKQIQQYSTEQKLALTLKINYSMFSMDQKQFYKEFLYSELSKVGKLWAIENRRIIWTYAFVESFSEPYSIEKNILSVDLNFILYEGIWHYADEKKTFLKPYDACSFADCLEFEEIDTCQDDIYGCCISCQKNNIKHKDCQKCSCECDFLTKEDSLCVKQKDIEKDYWKYCSGGYQIIYNCNKGHHLWGYNKMLGTKICKKELCDNYVAGKFYSNTVLETDVFTMTIIGRVEDPVIHLNGNAMRLKGIYDGELLIESNGDVFYREDDCCDFDKLPIENLELMNCNTFGWSIKHGYNSLLVETNDCCEPVCVFIKEDKITY

SEQ ID NO: 6025 - protein, 864 aa, Enterococcus faecalis
GSPLFCELVVVNFILQKRLPFLYGFFHLHKIFYTLVIGGKDNIFEKLGSLMKGKVDTAIFDEMENILNKMISLSNKMKTLQENKFSISDITSKVTVIKDILEKLDPADWDIAKSGVVSSKIIDQADTTIFWLNKLSKKLAALSESKLETGSVQNVLQNIKGALRMLTNESWSDFSGGVVPKDFIDMTGQSVDGLNSINKKLSKLSETSFDLGKTQTMIANLKSSLRMLQIKSWGDFDGGIVERGTLDKLDTAVYWLSSIAKKFGTLSNFEFDGGKLQGIIANIKDALRLLQADSWTDFNEGIVGKRLLDQLDTSIYWLNKVGSKLNELSNLPLETGKAQSVIQNIKGSIRMLRIDSWSDFNNGFVDREMLSGLDVAVLWVTRVANRLKGLSGINIETDKINSTIASTKGALRMFQASSWQDYNEGIVKADFIKALDLVLINFIQLANRVNGLASITLENDKVHSTITAVKGVINRLTIDTFPDSNTMIGEDVIDKIDTTVYRLITLANRINQIPQLTLGVDELSNNIKSIKYVATEMAISKWQGISEGVISSETLGMIVSSVSKLGTISNKLSVLNALPFDWTSVLNNVNRMKSIIELMNTFPSAKGLDSIPELVESFKKLLITLQGLESKFEPIGKSYGQQVINGFKNADVPSKIKKVIDDLITNLRNKDTEFNNVGKGFGDSLKSGFTNALQGLDSNIDSYVTSINNKISSIQTNLNSLTAPSLTVDVTENVKTRRVTRANGGIIPQYRANGGSIMKHIFKSKGTDRVPAMLTAGEYVQRKKAVDHFGIDFMERINNLDLSGALASITNRFGNSQPVSNVMNRYYNTTKNTRNNNNTINQNISMTGNPNFANLRANRFLRGV

SEQ ID NO: 6026 - protein, 202 aa, Enterococcus faecalis
RQPIHRKEDFPMNDFTTEIVQTLVTKGDLNELFRSHLEKAINTLLRTELTAFLDYEKYDRTGFNSGNSRNGSYFRSIKTEYGELTLEIPRDRNGEFKQQTLPAYKRTNDTLETTIIHLFEKGVTMSEIADLIEKMYGHHYTPQTMSNMTKVLTEEVNAFKSRALNDKYVAIFMDATYIPLKRQTVSKEAIYIAIVLQPGEGE

SEQ ID NO: 6027 - protein, 379 aa, Enterococcus faecalis
AVPRGGHLLFDDIPFLEKAQAEHDAFAELLRSKDIEVVYLEDLAAEALINEEVRRQFIDQFLEEANIRSESAKEKVRELMLEIDDNEELIQKAIAGIQKQELPKYEQEFLTDMVEADYPFIIDPMPNLYFTRDNFATMGHGISLNHMYSVTRQRETIFGQYIFDYHPRFAGKEVPRVYDRSESTRIEGGDELILSKEVVAIGISQRTDAASIEKIARNIFEQKLGFKNILAFDIGEHRKFMHLDTVFTMIDYDKFTIHPEIEGGLVVYSITEKADGDIQITKEKDTLDNILCKYLHLDNVQLIRCGAGNLTAAAREQWNDGSNTLAIAPGEVVVYDRNTITNKALEEAGVKLNYIPGSELVRGRGGPRCMSMPLYREDL

SEQ ID NO: 6028 - protein, 352 aa, Enterococcus faecalis
RSLKKHPKIGGIIMNSVFQGRSLLAEKDFSRAELEYLVDFSIHLKELKKKGIPHHYLEGKNIALLFEKTSTRTRSAFTTAAIDLGAHPEYLGANDIQLGKKESVEDTAIVLGSMFDGIEFRGFSQEVVEDLAKYSGVPVWNGLTDQWHPTQMIADFMTVKENFGRLEGITLVYVGDGRNNMANSLLVTGAILGVNVRICAPKELFPSDEVVNYAKEFAKESGAELMITDDVAKGVKGANVLYTDVWVSMGEEDKFEERVNLLKPYQINMAMLEKTENMDGDLIVLHCLPAFHDTKTQYGEMVAEKFGITEMEITDEVFRSKYGRQFEEAENRMHSIKAIMAATLGNLFIPRV

SEQ ID NO: 6029 - protein, 334 aa, Enterococcus faecalis
LFRPLRVSFEGRPILYYDRKEGFVMGKKMVVALGGNAILSNDASAHAQQQALVQTSAYLVHLIKQGHRLIVSHGNGPQVGNLLLQQQAADSEKNPAMPLDTCVAMTQGSIGYWLSNALNQELNKAGIKKQVATVLTQVVVDPADEAFKNPTKPIGPFLTEAEAKEAMQAGAIFKEDAGRGWRKVVPSPKPIDIHEAETINTLIKNDIITISCGGGGIPVVGQELKGVEAVIDKDFASEKLAELVDADALVILTGVDYVCINYGKPDEKQLTNVTVAELEEYKQAGHFAPGSMLPKIEAAIQFVESQPNKQAIITSLENLGSMSGDEIVGTVVTK

SEQ ID NO: 6030 - protein, 238 aa, Enterococcus faecalis
SIVFRRIKMMIEKIITKNNQDFQYFSESELTELRNESFVRSYKKGQVLFYPGDPRNHLILLVSGVIKIEKNDRSGNFSYLHFMKKQALFPRIGLFQDEVHYDSAIAYTDIEVVFVPVKLFERFLQNNPQQLIHWIQEQSVLLKESMIKIQKGTTNDACERIVTSLAMLLNDLGERIDNRERVAITCPITINDIARMSGTTRETASSVMKKLVQMNRISYSHKFLTFLDTPFFIDRLSN

SEQ ID NO: 6031 - protein, 485 aa, Enterococcus faecalis
KDMAEKKKKNKKQLSSFSILFIILIVLGIVTVLLNGQPFTPREIDGKMVDHVVGAKLSDIIMAPFNGFKDAIEINIFILVLGGFLNIVTQTGALEAGIQSVVKKLKGNELKIIPILMILFSIGGSTYGMAEETIPFYGLLSATMVAAGFDTFVAVGTVLLGAGSGVIGSTVNPFSTGVAMDALRGIGIQPNTGIILIVGAILWAASTSYSIFIVMRYAKKVKADKGSTILSLQEQEDMEKTYGQAASKEMPFTNRHKKILMVFAFCFVIMIVSLIPWNDFGVTIFKGWTSVLTGNSFGDWYFGDLAMWFFLLGIIAALIGRFTEKETIEAFIDGAKDMLSVVLIIVVARGASVLMSKTYLDSFILDKAAGLLQGLSPVLFVIGAFVLYLGLSFLIPSTSGLAYVSIPVMGALAKNIGLSPEVMVMIFASGCGLINLITPTSGVVMGGLEISKVQYATWTKFMAKPMIVLGLINLIILIGAMLLFS

SEQ ID NO: 6032 - protein, 245 aa, Enterococcus faecalis
ATPTTIDPHYVDYAREEASMKKILVVLTNVSRYHGTEEPTGLWLGEATEFVEEVTKAGFSVDYVSPQGGYVPLDPRSMKYVDSSIMAVYESADFQERALAHSLSLEEIEPDEYAAIYFTGGHGVMWDFPDNPQLQAITRSLYEQGKYLTSVCHGIAGLLNVKDASGNYLIADKTITGFTTAEEILAMKKAVVPFLNETIAKEHGATFAKKRPYKEFAYQDDRIITGQNPFSVRAVARLLIQQLSK

SEQ ID NO: 6033 - protein, 120 aa, Enterococcus faecalis
KYEPKRRKNMKELEEIQTEFTALSDFLIALGDEKRQAIIIALLEDQACVGRRVTELTEATQLSRPAVSHHLKILKQAKLIDCRSEGTKNYYSLSHDTTKIEQLQQLLTHITSIMPGRKQA

SEQ ID NO: 6034 - protein, 346 aa, Enterococcus faecalis
KERKDSMMKAALIHKYGQKELAIEEVPLPTIHDNDVLVKIIAASINPIDLKTKDGKVKMLLDYQMPLILGSDFAGIVVSVGKNVQNFRLGDAVYGRVPKNRVGTFAEYIAVDQAAVAMKPKNLTFEEAAAIPLVGLTSYQALHDIMNVQPGQKVLIQAGSGGIGTIAIQLAKLAGAYVATTTSSKNKEWVQALGADEVIDYRTQNFEEVLSDYDYVFDTMGGTILEKAFSVVKPQGKVVTLSGIPNERFAKEYGLPLWKQWAFKIATRKIHRLEQATDVSYHFLFMRPDGEQLALLTEFIEQGKLQPIIDRVVPFSQIQEAVDYSLTGRAQGKIVVKIAELINMDG

SEQ ID NO: 6035 - protein, 271 aa, Enterococcus faecalis
GVKNMGKLIGKLYETKDYSKFKFLKGNRAIKEKRSLIESIEKSGILVPIDVNEKFEIIDGQTRFLIARKLNKSIPYIISKGLNLDDVIELNSTIKTWKIGDFIRKYSMDGMNEYKKLQFIVKKYKNISPSSLISLAMGNKHYDGNSQELVKTGQFSFYNYKEFIRLLDSYGNFCEELNLRSSQQTFFAYVELFIVKDFDYYRLINGFKIKTKNVIEGIFHQGVVLEEFLKAYNYKLHRNSNKAIKYEIEIDGKPVIRDIQSMFLIKEIKNG

SEQ ID NO: 6036 - protein, 234 aa, Enterococcus faecalis
KMDREMSDIYITEEYEMFSFLRSNREVTLNKKLENSILQKGIIRPIIVNSTMQIIDGQHRYSIARKYGLPVPYYVSVNKEMNDIIKINNTACKWRVIDYINKYVILGNEEYKKLKDLHIENNKIPLVELVSVCMGSWTRQNKMMTEVKNGMFSFYNYEELKNLLNEYNELKKNTQIKDAGAVFQAYFNLSSIMKYNQKWFIKKVNGLEISRKVLGIRQPEKVLKLFLSQVQTPV

SEQ ID NO: 6037 - protein, 174 aa, Enterococcus faecalis
IPKRTPVYKVTELLFSDAHKGLFSAIRKSFTNVSWQRCQVHFLRNIFTTIPKKNSKSFREAVKGIFKFTDINLAREAKNRLIHDYIDQPKYSKACASLDDGFEDAFQYTVQGNSHNRLKSTNLIERLNQEVRRREKIIRIFPNQTSANRLIGAVLMDLHDEWIYSSRKYINFDK

SEQ ID NO: 6038 - protein, 386 aa, Enterococcus faecalis
INPGAKITPLQGFTQGNQVTVTSDPFTYSASKALPSVYAAGAKTYKFVGWYKGTTKPTTLKTTATPNYLVDFDDNDDMTAVYEEETPTAALTLTSTNRVVNNDDSVDWVATLKNTSLAPLKTLTVKPATTWPAGIGTPTSLSVQLDGQAPKIYPVTATTWSEGISLTGLEIPAGQTANVTLVGTKISGTSDQRLTATLDVTGNFATVSAADAVRLTDTTQGTITPTEGFISVPTFDFGKMNIASKTQQSGLKKAADYYENGTRNPYLRIKKNQPNWQMTAQLSQPKATTDSLPTATRLLLGPANVSSFTNYNEATEQIKAVGKTSSLSLTANNVATSVVANQQFTGSDVYQLDFTFENIKLEVPANQGTKGQQYNAAVTWNLVTGP

SEQ ID NO: 6039 - protein, 70 aa, Enterococcus faecalis
IFGACPSNWTESDVGVPIPAGQVVAGFTVSVLSGARLVFFSVATQSTLSSLFTTRLVLVKVKAAVGVSSS

SEQ ID NO: 6040 - protein, 913 aa, Enterococcus faecalis
VFFNKYQEKSAEIREKMVNSTDFQAVFYQKTVAPPWYKRNHWKYQVVVSKFKISVGPFFDKMKIIQKIIHRTIKITIKSYIKKENGMNQKRNRLFAIALCGSLLISSLNGIPAIAETMAAPDVQGEDRQTVVPSEGVQGRAPVSFPEADTEVGVPPADEELPEQTEQVVGQVEASVTSPIIVNTPESLRAQRAVQTFDIPEKTYKMSFLDESGRFIDPAKVSITGDIMKFTMQGALTKVGAVATNNVGTTKQLTVPKVALSGDTAIKSYDFSGIQNEKITLPRFYNVPKITPSANYTGQIYPMAVTKQVNVTGEVSNEETTGARLNMFVSGIPNQFVFSRASWDNDPAGNMFARGFNMATAGGTPAYLTTDDHIYYYVPNKRVNIYYNDMTPNGLPAYPPGYNASLSKTVVDSENFHYKAPKAFPEFFSSGNRHFQFKGWYKGPARPADPKAVKLETSLTPEFDVTYDGADNLYVFYDEVKEMTTTIPEVTYKFGFVDEKGALVAPTNVDIQANLTTVEDKVVQKVGAITGANVGNLKQLTVPSQTLTYVPKIKVASSGVTDFRLTIPKRYKIPTVTPGSFYTGSTTAYPLATTLLRHISGQADERITTDGTRYSLYNLPTPHSYRMYRSSWQPDVTNTGFSATLNMATTEIYPAYFTTDNTMYYFLENRRVTEHYVNEAGAEVPMPTGFTQGNQTVIDSDTYHFKLAKELPFSYFLNNKAYRFKGWYKGKTKPKVLETSRTPEYDTTFDDNDDLTVVYEEIKYGGNAVTFGFVGEDGQLLQPTGFQVTTDIVETIDGLSTVLSNVSAVDSTGNVKTLTIPQKEYVLTPQMNFYGTKNSLITIPRQYQEISFTKPANYQGLDYPVAGRVENMFSGNLYVEGAQPPYFSASKVKANQYKIIEFHWKEEPTPNFS

SEQ ID NO: 6041 - protein, 748 aa, Enterococcus faecalis
LTNEKMPNKLTFGPKKTFKYTVATAPGGVTYALTYFYGDVGGPTSSHQRRGTAGPVYYYLTKRRVTEKFENPAGGAIPAPEGYTQDKKTIVTGEDFTFTQEGTLPERYTGSDGKTYLFKGWYKGNAKPSTLETTKTPSYAVTYDDNDDLHVVYEEAVMKTYTLPAREALFGYVDEQGNLINPAKFKLSATMGESDGATGEMTTFPTIDGIDMPASQLKKLAIPQKVYTRPDDGTIVTYGPQEVSVEIPKYYQTISISPTTAYTGDKTKYPVPNEVRRGIENPDNIVSSLVGTTAYNLTQKSATRYTARRSYWTWGPTKTLYSMSIYSGTAGGNYNLSTPDGTIYYYLENRRVTEHFVDESGAKITPPTGFTQGNQLVVDSENYVYTVAKALPKIYQAGEKTYIFQGWFKGKTKPATLKTTTTPSFTPTFNDEDDMTAVYQEAIPTAELTLTGAVDIIENGATMDYWEALLKNTGEAPLTTIKIKPTATWAAGIGAPNTIFVQGTGQNTKAFPVTKEQWTTGAGVSITLDQPLPAGGQLKMNLLGTAVTGNPGQVLTADVEVTGNFGSLTAKDTVRIKDLDQEITSPDGDGFISTPTFDFGKLAISGSKQQYGLKKAADYYGNGTRNPYLRLNTSQANWSLTAQLSQPKSATDSLPTTTRLLLGTAAAASFTDYNQPTETRTPLGKTSTVTLTADNTATAVVANQQFTGSDVYQLDFTFANIKLEVPANQGMAGQQYQAAVTWNLVTGP

SEQ ID NO: 6042 - protein, 275 aa, Enterococcus faecalis
KTALNMSKFEISSCVFFGKINKKMLVISIDNNRILIKKGLYRDYRLNFYIERRSKMKRVNWKRWLVVGLSCSLFMDSVVGVTVLAETITGATEQGVATSQSSDEASQTTQTTEESQATVASEAKTVPPQETARIASRAIGYSSVEGREIPFFFVEEDGTLFDPDRITMAVNLSTFSFYEEKLQRTPLEPTTVNGGKLLSIPTSPAFKYDTNNQNPSNIYGVSEVSFTIPKEYQSLDIRPSTFYTGDTTQYPVPTVFANVGGKVTNYVGANAETEL

SEQ ID NO: 6043 - protein, 1278 aa, Enterococcus faecalis
SVWRESYIERRDDMKQTKWQRLATIGLCSSLVINAFSGVTAVAETVTIESSPTAESSAKEETQASSVKEETTKASTENSQVTTDTSQEEATKEAEKEEPQAEVEQAETPIIPKPKKINMKATYSFSAETYQFGFVNESGQLINPDIIPITYSYAKGSWKTDGYNRKWTSMVQGSASTVGNLKNVIMPATSVVMPPGPSYEGTQEVYTNFSIRIPKYYASASLYNREGKIDSTYPLPAIALAGTRPLSLTQSSVISALALTSKGDNVYTPRETFFGGDPAGVKFTNFLYRINDFDVKGNNIGYKTVSSPIYYHLTNRRVTENFVDTSGAKITPPSNFTQGKQTVINSDPYTFQQSGFLPETYKVGTKSYRFKGWYKGKTKTEPLATTKTPSYKVTYDDNDDLTVVYEEFSGYELPASTNQFGFVDEATNKLIAPDQVQMKYNLTLNENNKKTVMSSNLTGTDTATLKNLSVPVNYFEQYRVNTFYGASDITFTLPKRYKSINITKSDGKTDPAFPLPKIYNIDQVEMSHMPVTTYNKLKQLSGQTFGFNALADQPEFYTKTLFGTESGIDDPVNYYTMSGPVYYYLENRKVTENFVDTNGAKITPPTGFTQGKKTVITSDAYTFKQAGTLPDTYTTGGKTYKFKGWYKGKSILNTLTTTKAPSYQVTYDDNDDLNVVYEEETVTTVYPSVDMNFVNEKGGAFTPALTFSGKYYAQSTSAYLRTDLYDVTSKNNGNGQYTVSINNGSMPLSQELLKKYNNGQPISATNRLQFNVDKLAIDQQLKYVDSIQLDTAQSSNLKSYRYVYTNNSSLVFDPNVAPAEVDLSSESLNLLNFDSDGTYFSNANNRLFYTHLGYSGTPGVNYLLVMFLFNAKPADKSKLVYKVTRKQVTENFVDVNGAKITAPTGFTQGNQVPMNSNTFKYTAAKALPATYTTGGKVYTFQGWYKGKTKPSTLNKTTTPTFNATFDGNDDMTAMYKEEIPTASVTLTRPKEVIDTNTNVIWTTTITNTSKAPLQNLTLKKGPNWSAGLTIPTFMEVTPEGETTKSIPVNSTLWTEGVPLPNAVPIGKKVSVAFTTRATGKPNTVLKAEVVVFGGIKDSTVDNFVRIRPNDQEVVTPTTEGFISVPTFDFGQVGVAGTKQQHSLKQAADYYGNGTRNPYLRIKKTQPNWSLTAQLSQPKSATDSLPTATRLLLGAAPVSSFTNYNQPTELKNTVGTTSAISLTANNTATSIIANKQFTGSNVYQLDFTFNNVKLEVPANQGVKGQQYKAAVTWNLVTGP

SEQ ID NO: 6044 - protein, 143 aa, Enterococcus faecalis
QKVVLSFLCKRARKASELKGGFSMKKKRYLMIVCLLSSPSFFINVEASDGGSSSVGIEFYQNPRTPAPKDPPPKTDAPAADPKEPAGPPQGDQRSGGSTQTTTTGSTLPRTGSKSQANLSILGFALIGLAGIVHRKKGRHEAN

SEQ ID NO: 6045 - protein, 283 aa, Enterococcus faecalis
RGGIQWGNTLVFFIGMVVFDMATTAINNYMDFKKAKSDVYKYEENIIGQSGVSPQLVRNMIFAMIAFTAVVGAYLTVQTGWLFLVLGGICCFIGIFYTYGPIPLSRMPLGEIFSGFTMGLGIFVLTVYLNVVTNPPFYLTVDFASGAFRLDGNLWAVLAIVVASLPLVCSIANIMLANNLRDLDTDIENHRYTLVYYIGRPSGIVLFQVLALAGYLVILFGFISGIYQWPVLITFATLPVIWKNIQTFKQELPQPKSFRHSIKNLMVFNGTYALGLFIIALLG

SEQ ID NO: 6046 - protein, 64 aa, Enterococcus faecalis
HPLGEGLVFTQPQMNTYIRLNRPFTPSTNFVVLLLKCYTVTKNDLLFAEWRALIEKEIDWFVVS

SEQ ID NO: 6047 - protein, 324 aa, Enterococcus faecalis
LKKKSIGLLLASAYLFHARSRQKSLKACLFEDSLRLSQIARLERNPKVTKAFYHWQRSLNEQVTLPKHLRHLFPLQEMTQFPTMYRMSNSVIAPTKKAVLYLHGGGFTLNLAYSQLDFSYKLIEDLPFATDYFIPVYPLAPNKSFADIYNHCYAAYQEILQHYDPEDVILLGDSAGGTLVLNVLQNLATDFPERLPKAAVLISPWLDGHLDIPVAKSYQKKDKMIGMNYLQLIAQEIDDTANHATLSLNCLSFDYQKFPPLFFVGGTHEVFCPSYHQFLKQLGPRPQDTCRLVPGMQHVFAMKQYLPEGRQARKQIAQFIQEQW

SEQ ID NO: 6048 - protein, 467 aa, Enterococcus faecalis
QWHCTSIRRRKNMETLLNLFVSIVSQPAILVSLIALLGLVLQKKKFSDVVQGTLKTFVGFLVLIGGAGLLANSLTPFAEMFQTALNTQGVVPSNEAVVAIALQQYGTPTALIMLVGMVVNILLARFTRFKYIFLTGQAMMYVSCLTAVILVGAGFSVSLPMILLGGLFEGTLLTVTPALCQPFMKQITGNDKVAMGHTGNIGYAASGFIGKVFGNKEKSTEDIKIPKSFGFLRDSTISIMILMSIVYVILALLAGTGYVEHELSNGENAIIFSLIQAGTFTAGFVVVLQGVRMVLGEIVPAFQGIAKKLVPNSKPALDVPIIFPYAPNAVLIGFFVSFIVGTISMLAMVGLNTTVIIPGVVGHFFCGAAAGVFGNSTGGRRGAILGAAFNGLLISWLPLFILPVLGDLQLASSTFADTDYLIPGLFLGKLGEAGPSLLVGGIIAFVVVVLLASAVLTMREKKVAEEN

SEQ ID NO: 6049 - protein, 118 aa, Enterococcus faecalis
WRLKPSQKYYQLSKKERNKMKIFTVCQSGLGTSFMVQMNIQQILEEVGVDTDNFQIDHTDVGSASGDMADYFFVEKTLQDALGSIPAEKIIPLNAIIDYDETKEKVLKVLDDNGIAHQ

SEQ ID NO: 6050 - protein, 676 aa, Enterococcus faecalis
LQEADTAVNYKISYLLDEYAGQKIALSLAQQITDLSQRELVTQLSTIGGVVQQNTVSIPNLSANEWGKQLFQQRQVIYSETERQALIFLLTYSEIEELSVYHYQNFLDVSKGTILADIKKVRHQLATENIALSYERKRGFYLEGDEFRIRRFGKNWLARLLQQKSGTFALFCWLSQHQMSQYAKIRDGIQLAVQEAQLQLVPSRLDEISYFLAFSQKRLGKYGTVVWPENQLIQSLRAYPVSHRILSDLVGPVANVETESLFFTICLMTALQGELRDTKLEFLLDISGEIIRKMELLAVVQFEQPRELLMNVYYHLVPAYFRISYGFYLPNVLIKDIRQSYRSLYHLCEQALAPLEKLTKRSIPSEEIGFFTILFGGEIFGQKNEQRQEKLKALIVCPSGISSSLILQSELRRLFPMIEFKETNAVREIENVSEKSYDIIFSTVPIETAKKVYLTKPIMSSLEKNQLMHQVQSDWLLPGISMPDVKDILDALKPYISLKKGVTEAQLYRVLHRKMNKILEKEEDLRPMLSELLTTETVQVLPEVADWRAGITEAAKPLLKNGSITEKYIDAMIQKVESFGPFIHICPDVALPHARPEDGVNQLGMSLLKIQKSVDLLEDPKHEIHLFICLAASDNETHLRALSSLTKILSKKESLHRLVAAETVPEILSIIQEGEK

SEQ ID NO: 6051 - protein, 145 aa, Enterococcus faecalis
KIDKEHAMMTMKSKGSLLVTLGILLTVGIASLIVSSESFAEEVGQTNIGVTFYGGKEPLKTEGVIKPIEQPVTDKDKKTSQQQDKVSRKTTAKTNPTNAQTSLPRTGERNSTWLYSLGIACLLVVLTSFYYLNKKGKRKNNVLFL

SEQ ID NO: 6052 - protein, 381 aa, Enterococcus faecalis
EEQIMKTMRWLIVTVFICVMALSIPSAVQAEEADDNMNTKFTVKPNIPENQAKNTQSYYDLIVKPGQKQEVELSLINKTDEELTIDLNLANAVTNDNGLIVYNDFEKKPDSSLKVPLTTLIKLPEEHVKVPAKKTVTAKMTVEIPANGFQGLVLGGVYASLAEDEKEEKGKSTGLTSRYGFNVAIALRMSEDTPMYLAETLQLVKLVPTIALGNKSVQAVIQNPTSAIFPEVRLEGKVTKKGETKEYAKRILPSVRFAPNSTMNFHLDFGKEDVRPGTYIFEGKAVLKEDEQQVWPFKQEFTISSQEAKKLNKEAVVKLVLPTWWNQAFYGLLVATIVSLILAIWRFTQQKATLKQQAYLQQEKQAALKNRQGARDDDNEK

SEQ ID NO: 6053 - protein, 237 aa, Enterococcus faecalis
PRYKGESKMKKKTLVTLFAGTAILGASIAPAAAHATTTGTTPANVEMTSGSLPGGTGDGDDGSTQEPEPGSNTNFDLLYVPTEFKFASTEVSSDLSAISLDATGTQTKRYAVGDVRGTQAGWSVTAGVAEMKNGTATLEGSITFAQTGAVAKYDETAKTYSRDVAAFAADPGSPEFAGTTIPVGGAAVSIATAAVGKGQGTWDSELSNVKLNITTPSSQITNGAYTGNVTWTLVAAP

SEQ ID NO: 6054 - protein, 326 aa, Enterococcus faecalis
GQIMKKMHVESEFAPLRSVVLAQSQFCLPDKFDEADTTFLTEENARLTQNNEGRDLADFAPEQQVRWEKEKEVMQGVLESYGVEVFRPRLLTTYEKEHGKELGVGYSNFFSRDPFFTIGNLLIEGNLRFQHRRQEILPIRPIIQQWTQEAEGYYFAAPQPDISEGALSEAGPFIEGGDVLVLGKTIFVGYSGLASNLAGIQWLANMIGHFGYEVVPVRLHPHILHLDCALSLLREGLMIVCEEAFLDGLPAQLANWEKIHVTLQEAAYLVTNGLPLNEETYITDQSFTTLIPQIEAKGIKVEAIDYHVSRMLGGSFRCTTQALIRE

SEQ ID NO: 6055 - protein, 507 aa, Enterococcus faecalis
QKQYNNLTLCLLVIYQKSTKTCYSQCMGRYEGGNKEMKKRALLGVTLLTFTTLAGCTNLSEQKSGEKQTEVAEAKATESEKASVKNVIFMIGDGMGNPYTTGYRYFKANHSDKRVPQTAFDTYLVGQQATYPEDEEENVTDSASAATAMAAGVKTYNNAIALDNDKSKTETVLERAKKVGKSTGLVATSEITHATPAAYGAHNVSRKNMAEIADDYFDDQIDGQHKVDVLLGGGSELFARKDRDLVKEFSQAGYGHVTDKKSLNENQDDKILGLFAPGGLPKMIDRTEEVPSLADMTEAALQRLDKNEKGFFLMVEGSQIDWAGHSNDIVGAMSEMQDFEAAFEKAIDFAKKDGETLVVTTADHSTGGLSLGKGDQYNWLTEPLHAAKRTPDFMAEEIIKNGNVEKTVTEYIDFQLSEAELKAVKTASESKDVEKIAQALRKIFDERSNTGWTTGGHTGEDVNVYAYGPQAEAFSGQIDNTDQAKIIFGLVDGTGQKAEIKDKGIGK

SEQ ID NO: 6056 - protein, 711 aa, Enterococcus faecalis
ITSEPSKVYLVCLESDTCQSSQLLNTSFKRGFFSNLYPMIKRTAVERCPLFSVETGFYLKAPGILFVIERKKKQMNHETIQKLQFTTILKEVQTRAIGEYSKERLAKMVPATRLETVQSRLTETTEARLIIDSGQHVPFMGLSQITRLLQQVKKGLILTPNELIEVADFLRSSQRIQKFFEKNQYQTPRLFSYSQHLADFRAIEEQIYTKIHNQKVATDASRQLRKIRRQINECQQEIETKVTKFLRNKNNQLYIQENMMVKKGEHYTVPIKASYKNKVSGTIIEQSNKGQTVFIEPVAISKLNEQLTLLKAEETAEEYQILAELTGLINEQERLVDQAVDTMTTLDIIFARGKYSREIGGITPKVNKEERLRIVQGKHPLLLEHAVPLTFSLGAEYRGLVITGANAGGKTVVLKTVGLLTVMTQFGLQIPAQAGTEIPVLDEIFVDIGDQQNLENALSTFSGHMKNIAEMLRNVKRHTLVLLDEIGSGTEPNEGAGLAIAIMETMYQKGALVVATTHYGEIKRFAQEHDDFVPAAMAFDRETLTPKYQLKIGEVGDSQALWIARKMKMEPQLIEKAAHYIQRKEYPTNRSLFKPLKAKETTFATFVEETHRYQKGDRVLLTETQQIGLVFTDEGEQEIQVFVNDKIENVPRRRLKLQAKAQDLYPQDYDLESLFTDFHERKKLKDIERGSKKAQKQLRKEAEKRAARRDK

SEQ ID NO: 6057 - protein, 143 aa, Enterococcus faecalis
  MISC_FEATURE (51)..(51): Amino acid 51 is Xaa wherein Xaa = any amino acid.
FVQDETVIYGLFHPTGKVGYVNIATVPLSFVRPAAEVPIETAIKLLKEHGXQFPLIFSPMKGLAHKEEYQAVAAACAKYDFYLEPTGGIDLENFEEIVQIAVDAGVKKIIPHVYSSIIDQETGDTRTEDVKTLLTMMKKTLNK

SEQ ID NO: 6058 - protein, 113 aa, Enterococcus faecalis
LPHVRLWLLQRSVKRRQQPTQPIFATHRIDVEPDSQLSNIYGTTGQVNSYHHQALHTLGKDLRVTAWSSDGLAEAVESTNEQQPLLAVQWHPELMYARDAKSQALFNYFVQKL

SEQ ID NO: 6059 - protein, 298 aa, Enterococcus faecalis
LFRERRMRSILKVMKMKGLKKHMTLDKTKKLANGNEMPRLGLGVWRVEDGSEATNSVKWALEVGYRLIDTAAVYKNEVGVGEGIRQSGIPREEIFVTTKLWNEDQGYENAIKAFDKSLEKLGLDYVDLYLIHWPVAGKYKESWKALEEIYASGRAKAIGVSNFHQHHLEDLLTEANVVPMVDQIELHPTLTQEPLRKYLAENKIAVEAWSPLGQGNLLSEPVLVKIGEKYGKSAAQVIIRWHLQNDIIVIPKSVHEKRIQENFAVFDFELTPEEITAINQLYKDHRFGADPDNFDFYV

SEQ ID NO: 6060 - protein, 135 aa, Enterococcus faecalis
INNIFYNFVKGCECCVKVSIEWAKNDLLSKLPVTIFIDERCATRLTADKRRTFIFHNPVALRLGSRFFSSQIIEIAESCTLKVSFNWSCVYLFCIWLLAVKLWIGSVSGRTIVVVALIGVLTYWRRYLLKIKKMT

SEQ ID NO: 6061 - protein, 319 aa, Enterococcus faecalis
YTKRRNFRESWIFMLILGLASTETVDSSAPDLAEATVKKVSALQRFWNNINWDAIVATLIEKSLSILFLIFLFFIIQRIGKYLIDRTYANYSKKQHFSESRLKTLHTLIINAFQYTLFFFFIYSLLTIVGVPVGSLLAGAGIAGVAIGLGAQGFMNDLITGFFIILEQQMDVGDYIRLLALNIEGTVTSVGLRTTQIKAVDGTVHFIPNRNITTISNLSRANMQVLIDVRINPEEGYEKICEVITEVNETLKEKYIESIQTEPDIFGMVDLGNGNFAVRTTMYVLNGKQFAVKEEFLAQYIKALTEAGFTIPNTPIIAK

SEQ ID NO: 6062 - protein, 393 aa, Enterococcus faecalis
RNFFMAAFDYPKNEGVAFVEQEELIAIRRQLHQIPEIGLEEKETQAFLLNEIDKMKQPYLQVRTWQTGILVFIEGKNPQKTIGWRADIDGLPIQEEVVSAFQSKRPGFMHACGHDFHMTIGLGVLKELSQQQPDNNFLFLFQPAEKNEAGGMLMYEDHAFGEWLPDEFYALHVNPDLPVGTISTRVGTLFAATCEVNITLKGKGGHAAFPHQANDMVLAATNLIQQAQTIVSRNVDPVVGAVVTFGTFHAGTACNVIAEEATLSGTIRTLTAETNEQTQRRIREISEGIAQSFQCEVTVHLDQKGYLPVVNEPACTTNFIEYMSKQATVQFQQAPVAMTGEDFGYLLSKVPGTMFWLGVASPYSLHSAKFEPNEEALLFGVEAVSGFLKSLDN

SEQ ID NO: 6063 - protein, 233 aa, Enterococcus faecalis
LDAYEIIQYIGDAKKQTLVKVTLKGQLKEVTFPETIKVFNNCKTGTLFGDWADVKPFLEANKEKIEDYVVENDARNSAIPFLDLKDINARIEPGALIREKVEIGDQAVIMMGAILNIGAVVGAGTMIDMGAVLGGRATVGKHCHIGAGTVLAGVIEPPSAAPVVIENEVVIGANAVVLEGVRVGEGAVVAAGAVVVEDVPAHTVVAGVPAKVIKQIDDKTKSKTEILEELRKL

SEQ ID NO: 6064 - protein, 171 aa, Enterococcus faecalis
RIRNGGNPIMIGTAVKELLLEKQETFLVPAENVANVMCLNPLSHAALVLSQVRYSKIPVLDKGDRFVGLIGLTDVVDKMFDLTSVDFEKLNEFTVADVMEVNVPVIGESWDLEEVLHLLVDASFLPVVDDNQRFKGIITRKEILKAVNHMAHELEKHHLVLPKSEEEMKVI

SEQ ID NO: 6065 - protein, 241 aa, Enterococcus faecalis
QRWVIMNNKAIIQAMKQRVYEANLALPKLGLVKLTWGNVSEINRSLGIIVIKPSGVKYQEMTKEQMVVTDLKGQLLETNALKPSSDLPTHLYLYQKMPEIGAIAHTHSLNSVTWAQAGRALPPYGTTHADAFYGAVPCTRALSESEIKENYEEETGKVIVETFHEQELDPLAVPGVLVYGHGPFTWGMTPEKAVENSLILDEICSMARLTEIINPDVEPIDHFLLDKHYLRKHGISAYYGQ

SEQ ID NO: 6066 - protein, 332 aa, Enterococcus faecalis
LSKRLNCFKQWQLQHLLRAVGLLNQKILNKQPKIFKKKSIRFGSDKMARIGLYEKALPQNLTWAERLTWAKKLGFDFLEMSIDESDERLARLAWTPSQLQEFSQLMVKEDFFIHSLCLSGHRRFPLGSLNKETREKGRKILSQAIRLAHQLNIRVIQIAGYDVFYEEKTAETREFFLQGLKKGVEEAAQYGVILAVEIMDDPFMNSIQKFLEIKEQIPSPFLHVYPDLGNLSAWPENNPAVELEKGIAEIAAIHLKDTFAVTDTFEGKFREVTFGEGCVDFTGLLKTLKRLNYSGPFLIEMWNETDLNFQEKIQAAQQYLYPKLAEVGYYEQ

SEQ ID NO: 6067 - protein, 237 aa, Enterococcus faecalis
CLQKKFKKNIWLQIVIKNLNKRVGKMKRPNLQIALDHNSLEDALADCMKVGEIVDIIEVGTILCLQEGQKAIRCLKRMFPNKTIVADTKCADAGGTVARNVAQAGADFMTVICCATLPTMAAAQKEVRELQVELYGNWTMQQARQWRELGINQVIYHQSRDALLAGGSWGEKDLNKVQELIDLGFEVSVTGGLTVETLELFQTMAVATFIAGRGITESKNPEQAAKDFQKKIDQIWK

SEQ ID NO: 6068 - protein, 110 aa, Enterococcus faecalis
KISRELKEEFEMRILVSCANGSGTSLMMMRSVEKAMKELGVPITKIHHCAISEGKSSASQYDVVFTPVNFLQMFQQAEKRGVTVIGIKNVMSAKEIQEKYMASDRYQKSE

SEQ ID NO: 6069 - protein, 499 aa, Enterococcus faecalis
GEKSMGEFLLNSWTYFATNVLTQPAYLIGFIVLLGYLLLRRPFYECLAGFLKATVGYFILSVGSGGLVNNFRPILVGLKERFNLQAMVTDPYFGQNAVDAGLMKTFGRTFGDVMILLLIAFIMNILLVRFQKYTKLRAVFTTGNVQIQQAATAFWILLFCFPNLGRIEVLIFMGLILGCYWAVASNLTVGITQELTEGAGFAVAHQQMFGIFIFAKLAEWLKKRDQKKHRSEKVDKKLEDIELPGFLSIFNENMVATSILMLFFFGIILLVLGQDYLIQAKFMQEGQSFFFYIMTTSLNFAVYLAILQLGVRTFVDELTQSFQGISNTILPGAVPGIDVAATFGFGSPNAVTIGFLFGALGQFLMIGLLILLKSPTIVIAGFIPLFFDNAVIAVYANNRGGVKAACLFPFLSGLIQVGGSALFATWIGLSQYGGYLGMFDWATAWPLFTIIMKVLGYVGVSMVVIGLLIIPQLQYRKNPEGYFMIVNDYEQYAKKFQEN

SEQ ID NO: 6070 - protein, 166 aa, Enterococcus faecalis
YTISFILVRKAGCTMLTYFWEQELIHYPDKEPVSWQEAIQESCLILLQKHIIDQSYVDEIIQCVETFGPYIIIAPEVAMPHSSEESAGVFGTAISFTKFKQAVTFAGDQEAKTATLFFTLAAQNPAEHLENIQQLMDLLMTDGVIADLLETNTPMDFKEVMEKYQL

SEQ ID NO: 6071 - protein, 367 aa, Enterococcus faecalis
SITQSFEKRSGSMSKSIHEITKESWLKATFPEWGTYLNEEINQTTVLQGTVALWWLGCTGIWLKTHENTNILCDLWCGTGKQTHGNGLMKNGHQMMRMSGCQKMQPNLRTQPFVIDPFEIKEVDALVVTHIHSDHLDIHTAAAVHQNCPKALFIGPKEVVKTWQRWGVPAEKTRVIEPGQEIKVNDVNVVALEAFDRTALITSDDPENTFKGKMPQDMNELAVNYLFETSGGTVYHAGDSHYSNLFAKHGNQYAIDVCLGAYGENPRGITDKITSVDMLRMAESLNAKVVIPVHYDIWSNFMADPKEIMEIWKFKKDRLHYQFKPYIWQVGGKFVYPDDKDNLEFNFDRGFDDVFVKENDTPFPSFL

SEQ ID NO: 6072 - protein, 259 aa, Enterococcus faecalis
RRLYYLKSSLETIEKRQQNILALLQKNKQMTTYKLADALNVSLSTIRRDLNVLETKNDIIRKYGYCIYNDQNQKDFDQSGPELLKQAIARVACSYLSDYDTVFINSSSTALNILHYLKADHLTIVTNNLKIATKPHVSQYNYILTGGELRFPKEVLVGDIAINTITATHADVCVIGCSGVSLEHGVTTKIFNEAKINELMIKQTTKVKILVADHRKIGLTSKFKIADITAFDCLITDKHCSSTLITELRKTGLKVIQVD

SEQ ID NO: 6073 - protein, 174 aa, Enterococcus faecalis
ELKRMKILVVSDNHGDRDCLVDLVNHYEGQVDALFHCGDSELEPTDELWQKFIVVQGNCDFYDEFPKTVTKKVGDQVIYMTHGHLANVRMGLTTLALQAEEAGATIALFGHTHVLGAERHNNILFVNPGSIRLPRGPVQEKTYAIIESTPEQYLVQYYNKEHQPLERLKATFTK

SEQ ID NO: 6074 - protein, 455 aa, Enterococcus faecalis
EETKMIRHDSRAPKELRKITIETNVFKHPEGSVVISFGDTKVICSATVEEKVPPFLRGGGTGWVAAEYSMLPRATNTRNIRESAKGKLTGRTMEIQRLIGRSLRAVVDLEKLGERSIVVDCDVIQADGGTRTASITGAFVALRLAVNHLLMTGALAEDPIKEHLAAVSVGILPDGYCVLDLDYAEDSNAAVDMNIVMTESGEFVEIQGTGEEATFSGDELNAMLFYGKTGIEELIAYQKEALYALASEEVPSQDSEEKVIVIATRNPGKAKEFSSIFGEKGYTVKTLLDYPNLPDVEETGRTFEENARLKAETIAEILQKPVLADDSGLIVDALGGMPGIYSARFAGEPTNDASNNAKLLHELTGVPKEKRQARFHCTLVFAEPKKESLVVEAEWPGEVGTIPRGEGGFGYDSLFYVPELGKTAAELSGEEKNKVSHRGQAVAKLKEQWEEWLKK

SEQ ID NO: 6075 - protein, 190 aa, Enterococcus faecalis
EIKAALPIPVVGVILPGARTSVKVTKNNKIGVIRTLGTIKSASYEIAIKSKAPTIEVTSLDCPKFVPIVESNQYRSSVAKKIVAETLQALQLKGLDTLILGCTHYPLLRPVIQNVMGSHVTLIDSGAETVGEVSMLLDYFDIAHTPEAPTQPHEFYTTGSAKMFEEIASSWLGIENLKAQQIHLGGNEND

SEQ ID NO: 6076 - protein, 73 aa, Enterococcus faecalis
EALLIVPNVRMTPILLFFVTLTDVRAPGKITPTTGIGKAALISYNATAVAVLHAITSIFIRFFNKKSAISQVN

SEQ ID NO: 6077 - protein, 90 aa, Enterococcus faecalis
IKGKGRMRMSNQEAIGLIDSGVGGLTVLKEALKQLPNERLIYLGDTARCPYGPRPAEQVVQFTWEMADFLLKKRIKMLVIACNTATAVAL

SEQ ID NO: 6078 - protein, 124 aa, Enterococcus faecalis
  MISC_FEATURE (115)..(115): Amino acid 115 is Xaa wherein Xaa = any amino acid.
LQRRLPMISLEHVNKYFGEHHVLKDITLNVEQGEKIVIIGPSGSGKSTLIRCMNQLEKVNDGSVVIDNIDITKPKAPIQKVRQKVAMVFQNFNLYAHKTIIDNLTLAPIKVLGVXRRRRPKPRE

SEQ ID NO: 6079 - protein, 227 aa, Enterococcus faecalis
GGISIPGVDKWMRERLDNPVNMGFSEMTRRLSRKEKGQIAQFEEDLLQMAQLRNAIVHERIADDFVIAEPNEWAVQRIETIEQALTKPEKVVPKFAKRVTAFEITTSLETLLTIIAKKQYSQFPIYEKGVFKGLITVRGIGVWFAIESTKGEVHIANRTVRELLASNYKRSNYQFVSIEATVFEVEQMFREQPRLEAVLISKSGHPNGELVGIVRPRDLASIHRKKE

SEQ ID NO: 6080 - protein, 61 aa, Enterococcus faecalis
KKGMTRLLVVYFLISALLVGLDQWSKYLTVQNISLGETKEFIPGFLSLTHLRNTGAAWSLL

SEQ ID NO: 6081 - protein, 102 aa, Enterococcus faecalis
GKMIFFYVITVIVSVVIIYLLIKNYKKSIWYSVGLSFVLAGAIGNFIDRVRLGYVLDMLQTDFMNFPIFNVADSTLVVGVICIFIYLILDEKAAKEGKNGTN

SEQ ID NO: 6082 - protein, 310 aa, Enterococcus faecalis
MKKQQRKAKMEQINVTIQTEKGRIDKVLSEHLPNHSRSQIQQWLKEKHVTVNGETVRANYKVTAGDEIVVTIPEPEVLDMVAEDIPLTIVYEDNDVIVVNKPQGMVVHPSAGHPKGTLVNALLHHADHLSAINDVVRPGIVHRIDKDTSGLLMVAKNDQAHESLAKQLKEKTSLRKYVALVHGVIPHDKGEINAPIGRSKVDRKMQAVIEGGKEAVTHFTVLERFDAFTLVELQLETGRTHQIRVHMKYIGYPLAGDPLYGPKKTLPGNGQFLHAKLLGFTHPTTGEQLVFEAPLPEVFEKTLHQLRNNH

SEQ ID NO: 6083 - protein, 70 aa, Enterococcus faecalis
FPPHFFFIYVLAVLGSAILPSIEQLKNKWVFIEIVLLFFPTKNPPTRMRIGGCWLQFKKVQGYHVAHTTY

SEQ ID NO: 6084 - protein, 182 aa, Enterococcus faecalis
GGNYYAKERIVDAVTMKRALTRISYEIIERNKGIQDIVLVGIKTRGIYIAQRLAERLKQLEDIDVPVGELDITLYRDDVKDMEEPELHSSDVPVSIEGKEVILVDDVLYTGRTIRAAMDAVMDLGRPRKISLAVLVDRGHRELPIRADYVGKNIPTSKTEEIIVEMEERDGADRIMISKGNE

SEQ ID NO: 6085 - protein, 428 aa, Enterococcus faecalis
TTLSEKEFRNEDAVLDIKDRPQAFHWVGLSLQHLFTMFGATVLVPILVGIDPGIALVSSGLGTMVYLITTKGKIPAYLGSSFAFIAAMQMLMKSDGYPAIAQGAMTTGLVYLIVSLIIKKIGSDWLDKILPPIVVGPVVMVIGLGLAANAANNAMYNNNVYDFKYIAVALITLGLTIFYNMFFKGFLGLIPILLGIVSGYLVALAFGIIDLTPIKEAAWFALPNFEVPFVQYEPKLYLNAITTMAPIAFVTMTEHIGHLMVLNKLTKRNFFQDPGLSKTLMGDGLAQIVAGFVGGPPVTSYGENIGVLAITRVHSVFVIGGAAVFAVALGFVGKLSALILSIPGPVISGISFVLFGVIAASGLKILIDNKINFDKKKNLLIASVILVIGIGGLVFKVGTFELSSMALATVLGIVLNLILPENARSEEQ

SEQ ID NO: 6086 - protein, 324 aa, Enterococcus faecalis
FYRKTHVAKNSRRTGRMIITSERISLKHLLTAEALTDREVMGLIRRAGEFKQGAKWHPEERQYFATNLFFENSTRTHKSFEVAEKKLGLEVIEFEASRSSVQKGETLYDTVLTMSAIGVDVAVIRHGKENYYDELIQSKTIQCSIINGGDGSGQHPTQCLLDLMTIYEEFGGFEGLKVAIVGDITHSRVAKSNMQLLNRLGAEIYFSGPEEWYDHQFDVYGQYVPLDEIVEKVDVMMLLRVQHERHDGKESFSKEGYHLEYGLTNERATRLQKHAIIMHPAPVNRDVELADELVESLQSRIVAQMSNGVFMRMAILEAILHGKA

SEQ ID NO: 6087 - protein, 448 aa, Enterococcus faecalis
RSLYAHGNFGSNFTWKGLGGEMKTLIKNGKIIKKENQLIEAALWLENGVIHAIGESFDEADFEQVFDANGQLITPGLVDVHVHFREPGFTYKETIKTGSKAAARGGFTTVCAMPNLNPVPDTAEKLSEVYDLIQKDAVVKVLQYAPITEELRSEVLTNQKALKEARAFAFTNDGVGVQTAGTMYLAMKEAAALNMALVAHTEDESLLFGGVMHEGEVSKKLGLPGILSATEASQIARDITLAKETGVHYHVCHVSTEESVRVIRDAKKAGIHVTAEVSPHHLILVDEDIPGDEGFWKMNPPLRGLADRQALIDGLLDGTIDCIATDHAPHGLEEKQQSFLNAPFGIVGSETAFQLIYTNFVETGIFTLEQVIDWMAVKPAEIFGLNAGTLTIGAPADIAVFDLATAAPIDAEAFESMAVNTPFTGWTVKGKTLMTFVDGALAWSEEAQ

SEQ ID NO: 6088 - protein, 88 aa, Enterococcus faecalis
TPVSFAKVISRAICEASVALKIPGRPNFLETSPSCITPPNNKDSSSVCATSAIFNAAASFMAKYIVPAVWTPTPSFVNAKARASFKAF

SEQ ID NO: 6089 - protein, 371 aa, Enterococcus faecalis
RSISLVGGGAVGLKRLLILEDGTVFEGKAFGAEGNVVGEVVFTTGMTGYQEAITDQSFNGQMITFTYPLVGNYGVNRDDYESIAPTCKGVIVKEHARVASNWRQQMTLDEFLKRKGIPGISGIDTRALTRKLRSAGTMKGSIIDAVDDLPHAFDQLKATVMPKNQVAQVSTTKPYPSPGIGRNVVVVDFGLKHSILRELSKRQCNLTVLPYNTTAEEILELSPDGVMLTNGPGDPKDVPEAIEMIQAIQGKVPIFGICLGHQLFSLANGADTYKMKFGHRGLNHPVREIATGRIDFTSQNHGYAVDEATIDPEKLLVTHVEVNDGTVEGVRHRDYPAFTVQYHPDAAPGPHDGLHLFDEFMELMDAWKEQN

SEQ ID NO: 6090 - protein, 1074 aa, Enterococcus faecalis
RIYGINGCMEGAKLMPKRTDIKKIMVIGSGPIIIGQAAEFDYAGTQACLALKEEGYEVVLVNSNPATIMTDKEIADHVYIEPITLEFVSRILRKERPDALLPTLGGQTGLNMAMELSESGILDELNVELLGTKLSAIDQAEDRDLFKQLMEELEQPIPESEIVNTVEQAVAFAKRIGYPIIVRPAFTLGGTGGGMCDTEEELRQIAENGLKLSPVTQCLIEKSIAGFKEIEYEVMRDSADNAIVVCNMENFDPVGIHTGDSIVFAPSQTLSDYEYQMLRDASLKIIRALKIEGGCNVQLALDPHSFNYYVIEVNPRVSRSSALASKATGYPIAKLAAKIAVGLTLDEMKNPVTGTTYAEFEPALDYVVSKIPRWPFDKFEKGARELGTQMKATGEVMAIGRNIEESLLKAVRSLEIGAYHNELAELSHVSDLELTKKMVHAQDDRLFYLSEAIRRGYSIEELQSLTKIDLFFLDKLLHIIEIETALESHVDNVAVLKEAKQNGFSDRKIAALWGQTEQAIADFRRANQIVPVYKMVDTCAAEFESHTPYFYSTYEVENESNVSKKPSVLVLGSGPIRIGQGVEFDYATVHSVKAIQAAGYEAIIMNSNPETVSTDFSVSDKLYFEPLTLEDVMNVIDLENPIGVIVQFGGQTAINLAEPLTKQGVKILGTTIEDLDRAENRDLFEQALQELAIPQPPGDTATSAEEAVVIADRIGYPVLVRPSYVLGGRAMEIVENQKDLEDYMRHAVKASPEHPVLVDSYLLGQECEVDAICDGETVLIPGIMEHIERAGVHSGDSMAVYPPQYLSQEIQATIADYTKKLALGLNCVGMMNIQFVIHENRVYVIEVNPRASRTVPFLSKITGIPMAQVATKAILGEKLTDLGYQDGLYPESKQVHVKAPVFSFTKLQKVDTYLGPEMKSTGEVMGSDYYLEKALYKAFEASGLHLPSYGAVLFTIADETKEEALEIAKRFSAIGYSLVATEGTADFLAKHQLPVKKVTKISNPEGETVLDVIRNGNAQVVINTMDKNRSSANQDGFSIRREAVEHGIPLFTSLDTANAILKVLESRAFTTEAI

SEQ ID NO: 6091 - protein, 266 aa, Enterococcus faecalis
RILMQRKQEMMTIVAQKQLAPRIYQLDLQGELVKEMTRPGQFVHIKVPRADLLLRRPISINQIDHSNETCRLIYRVEGAGTEVFATMKAGEQLDILGPLGNGFDITTVAAGQTAFIVGGGIGIPPLYELSKQLNEKGVKVIHFLGYASKEVAYYQQEFMALGETHFATDDGSFGAHGNVGRLLSEALAKGRIPDAVYACGANGMLKAIDSLFPTHPHVYLSLEERMACGIGACYACVCHKKGDTTGAKSVKVCDEGPIFKASEVIL

SEQ ID NO: 6092 - protein, 315 aa, Enterococcus faecalis
GYLMMKNPLAVSIPGLTLKNPIIPASGCFGFGEEYANYYDLDQLGSIMIKATTPQARYGNPTPRVAETPSGMLNAIGLQNPGLEVVMQEKLPKLEKYPNLPIIANVAGACEEDYVAVCAKIGQAPNVKAIELNISCPNVKHGGIAFGTDPEVAFQLTQAVKKVASVPIYVKLSPNVTDIVPIAQAIEAGGADGFSMINTLLGMRIDLKTRKPILANQTGGLSGPAIKPVAIRLIRQVASVSQLPIIGMGGVQTVDDVLEMFMAGASAVGVGTANFTDPYICPKLIDGLPKRMEELGIESLEQLIKEVREGQQNAR

SEQ ID NO: 6093 - protein, 184 aa, Enterococcus faecalis
ERGSKMHDRPIIALDFPTQKEVAVFLEKFPKEEALFVKVGMELFYAEGPAIVRWLKEQGHDVFLDLKLHDIPNTVEKAMTNLAKLGVAITNVHAAGGVRMMQAAKEGLIKGTQPGAKVPELIAVTQLTFTSEEEMHHDQLINVPLETSVIHYAKCAEKAGLDGVVCSALEARGIQEATKQTFIC

SEQ ID NO: 6094 - protein, 257 aa, Enterococcus faecalis
VTNNGSLRRNMLAKLGPHISLLADLLPKQKILMKPIKKSKKTGAKSNMTKVAKKIAKDLLDIEAVFLNPNEPFTWASGIKSPIYCDNRITMSYPAVRKEIAEGLAAKIKETFPEVEVIAGTATAGIPHAAWVADILGLPMVYIRSKAKDHGKGNQIEGRISEGQKMVVIEDLISTGGSVLEAAEAAEREGATVLGVAAIFTYELPKGTANFADKQMTLLTLTNYSTLIDAALEANYIEEKDVTLLQEWKKDPENWGK

SEQ ID NO: 6095 - protein, 126 aa, Enterococcus faecalis
VLPDYYVEMKEECMKKIKNMDVEWSYTGNDGPEHWHTLCDWFAEGAKFAYQSPIALEKESAETVNSQITFHYKKEEFTEKEFKNTFHFVPPNTESYVMFENVAYHLTDIHFHMANQKFGYGENIFG

SEQ ID NO: 6096 - protein, 123 aa, Enterococcus faecalis
PISIFIWPTKNLVTGKTFSARNPLWGLLKQTGENLIGRCLFSITEEKNRFSEANHPMDWENGTHQQWFNPSIFLPEERLHYHYVGSLTTPPTKGPVKWFVFDTIQKMDQAFLNKIKEGMLASN

SEQ ID NO: 6097 - protein, 146 aa, Enterococcus faecalis
VYKYKRLSIENSVGDHMKITIPMTPKPQSRPRFARRGRYVQTYEDSTMKTYKQQVKTYLKRAKPKLIEKGPIMAHVTFYVQAPKSALSNKQKRLDVKLERKYCDKKPDLDNYFKAVTDAAEGILYKNDGQIAVIVCQKGQSSPQVA

SEQ ID NO: 6098 - protein, 290 aa, Enterococcus faecalis
LMMNTKVALKQLMATHFITVDVSCPECGGAMTAWKEPTPDTPPRCPPVCMECGYRSVKKKEATTAKNLYESSLIKKAKDYFLNGSVLTDRKSLHKKIGNYYPSNQESTKAKNISMKFCEKTLLGEIHHLILTGGVGVGKSHLAIGCLNEILVKSNYSKKVLFVSYRELLEQLKFAMNDEEARKAITGVAMSEIKAADVVVLDDIGAELGDFNKRDEKGNLILSRASNFDIDTLTGILESRIDKPTIITSNLKSKEIQYCYGERIVSRMATHSNGFMHRFTNTKDYRLKTA

SEQ ID NO: 6099 - protein, 291 aa, Enterococcus faecalis
MIYRREADMARPLKQGIDYFPLSVDFLRDIKVRKIKRACGPYTVEILLCLLGNIYRETGYYIGWDEDTMFLVADEVGAKEGLVEETVNKAVQVGFFNQEKFNEYRILTSNGIQKRYLEATKKRKEVVISDIYLVNDTIKEEETLVNGVDNEQSKVNKSKVDKSKVNKNNKEKPAVQLSSEKDFLENPLGDKKTAELIAYYSKNVSLATPVNMTNLAYDLKDFNGDLDLLKEAINICSNNVKTYAYFAGILKQWRANGINTHADFLKKVNKKSKQKNKRDSEPPLNDYSGLF

SEQ ID NO: 6100 - protein, 272 aa, Enterococcus faecalis
MEMLKTKTALTLSDKNYYSTEADWHYMSVSQYKNFNECEAATMARLKKSWLPCSDPKALLVGNYVHSYFESSKIHDLFKKENKDKMYSSRKPYGLLKDFQIAEQMIQRLKEEPAFINLYKGEKEVIVTGQIENVDWKGKIDCLNLEDGYFVDIKTTKDIHERKWNDSYAERCTFIENYGYVLQMAVYKELLSQKYNREFVPIIAAVSKQTPSEVKLITLDEDKMHFEMIQLKENIEHIIKVKNGEEKPTLCGRCEYCRGQQRITHFTNMNDL

SEQ ID NO: 6101 - protein, 313 aa, Enterococcus faecalis
KLEEIIMGNELIVSVQNRIQEMQHGEGLRLPTGYSVGNALNSAYLILSDNSKGKSLLEKCHPTSVSKALLNMAIQGLSPAKNQCYFVPYGDQCTLMRSYFGSVSILERLSNVKKVHAEVIFEGDEFEIGSEDGRTVVTNFKPSFLNRDNPIIGAFAWVEQTDGIKVYTIMTKKEIDKSWSKAKTKNVQNDYPQEMAKRTVLSRAAKMFINSSSDNDLLVKAINETTEDEYDNNQQRKDITPNPPNIEKLEKSIFNQDENKKIAQDMIDSIDLNQADKDLQEELNIEFPDPSKNYLATGEVNGDVENEDGPYPF

SEQ ID NO: 6102 - protein, 126 aa, Enterococcus faecalis
KTILKLKMFLIKGGITMNLQEAYALDKYLTTPPEEFYEEEIDETADYDKDSMGETIAQEDGVFEILYTVTTVMSNRCLKIKTEKAIVTQQDIVDFILEIGEEKITSIKFVGLGEKYLEIGGNYNGE

SEQ ID NO: 6103 - protein, 98 aa, Enterococcus faecalis
MQKNNNKLTMSARFGEWYKEATENCAERELYATSLIARMDWLVDPKSVNNSRYDLTTALNKKHSSAWYDVATEICNKRKETVIRALLEDNIEIENVFN

SEQ ID NO: 6104 - protein, 108 aa, Enterococcus faecalis
LNRKIRSLIKELTEECDKEKVSLICTANNQGETVSAICGGLVELSFCLGVQEKKLSEKLPIHPEILRKSAVETLEEIKSDNHKHTFVVENAEDLQDILNRIASGEFDE

SEQ ID NO: 6105 - protein, 75 aa, Enterococcus faecalis
NERKLKMNKRKPRSLYEARILGTLLVFFILGLVIKNNIPFNYLLLILGPIIVIWFMKYDDAKYQENLNKIEKDVY

SEQ ID NO: 6106 - protein, 89 aa, Enterococcus faecalis
IKEGSNLKSNISMQDVSKRLSRNLYMMMGTPREDTKKIWKVSELSKASGVTPCVISRIKNDTEGKEKPTIETVVKLAKALNVDPAELLK

SEQ ID NO: 6107 - protein, 183 aa, Enterococcus faecalis
QIIRNEVKMTRSIKLNKQLRKAALKKGLSQKQVAQSVHFAHTTTNGHFNGYPVPPESAIAYNELFNDSELAFALGQELLGLIGLATGVKVKKEPLALSVLKEKEEREREKIEVENEIDYLMAIPDEELTEKQKQAILQYCSEYSDELLFEVSLICKQLELIGMSFMDLMILRTPYWKNKKWIE

SEQ ID NO: 6108 - protein, 62 aa, Enterococcus faecalis
LGGHKMTTKEKIEFIKQVTSHSDSEVEKIIKGMSDTSINRWYEIEKYRIDQELEEAVLTIYC

SEQ ID NO: 6109 - protein, 73 aa, Enterococcus faecalis
YVEGGKNMREWLVDSRLKNKLTQEQVAERADIERSYYNMIERGKRRPSVEIAKKLQMFYPSTGLFFLSENVTK

SEQ ID NO: 6110 - protein, 149 aa, Enterococcus faecalis
QKVPFFFMSITVTSCYYISIGGGIMFHIKIKELRTEKKLTQQDVADYLGITRPAYTAYESGKRQPDFETLQKLATLFDVTTDFLLGRNHTPEWANKDEVMELDKLLDSNIGMTYGPEEMTAEDREQINDLIASYFWVKKQKEARNKDGK

SEQ ID NO: 6111 - protein, 155 aa, Enterococcus faecalis
RWEVISLKSVIYDLEDIFSWTRSYDPFEIAHHLDIDIVYTSKLPIGYHGLAVPELNTIFIASFLNGSNYSYFVCAHELIHITEHDGINSFYNANRYSRSKMEYEADNGAIFLLCKYYLYHVASDESVNICIIASYFGLNEDFYPDIEKCLRFIIN

SEQ ID NO: 6112 - protein, 308 aa, Enterococcus faecalis
IKLHMYFLGGIRMKKLISLGLVCGCGISLFTACSGNDGNKNESTINTSSKIKEKAESTEFISKGDYKVGEDIPEGNYYVVLTDLEHSPEDTNKLTEVYINISDNNKKHLKTIYFSQPGQKERIKLEKDNNIQITDNGIEFKNFTLKFLNDSDFKEYMKNPVSSTEASEQKTVNSDVSNSSSQDNKQSDVADKKEVGTEAKSDVATNTLSSEDKNTNDITKLADEPTLEQQTVLDTLAKHQFNDMYPYKGSKMHSIIGVIQPWTQKDGKWYQKVSATIVNAYGAKRETNVEIHITPQSADSGLVEIIDY

SEQ ID NO: 6113 - protein, 388 aa, Enterococcus faecalis
KLSERLIFMAEPKKLANGKWQLRFRYKDPITNEWKNKMITRSTKKACRDAETEFKSKIMRGENTEAIKLLDFYDIWVDTFKKNKVSAGRMQKIALTRNNLNDFFGDKQLLKGVTKVKYQQWINWLAKPGNINEKGLAFETVSNRHNIVKSMFLEALDMQYIHSNPTRNIKLTGQIPEKKSNKTISIDDLTKFKEALLSRENTTSKYFILVQLYTGARYQEVAALTWDSIDESNEVIKIKNAYKYDAGQYRIGPTKSEAGVRNIDVPSSLFYYLKKYEIEQKKRILRGDLRNPKNFVFVSKKNSWPISNSSVNKYIKETCELANIERISSHSFRHARSDLLILAEAHPIYIKTQVGHKEIIQSYEYASATEANRKKNKEKYENKYKDIL

SEQ ID NO: 6114 - protein, 502 aa, Enterococcus faecalis
LLEWSTMMKQLPTESKKFDLKNWCIENKAYLLLIILIYQVAVLSIGIINFPYLDDNARQVAGMTDFGTTYARWGSEFLSWFVQGSRHLTDLGLTTPILTGLILSLTSILAIYIINDQKISWGSSLVATLIGLNPWFLQCLSFRFDSPYMALSIFCSFLPFYWWQRNSFTFFLVSVFSLFVMFNTYQASSGIYIVIVLFLTFKQLLAGENFIALCKKVALAAIAYLLSIVSYLIELKFVPSATNNIGGSQALPSLHDIPSVAYQNSYHYFSELLNQSNRLWLLLLLLLLVLFFISHLSNSKINLGLSFLYCILYLGLASLLSFGIFIVYSRNIAGDAPRYIYGFAVFVTISMLSLFNNRQVKAIYLTSLLVASLLSYYILSFVLVYSSTLNYQKEAFNRQAAVLTDDLKNVVTNERKKVYLNTFFKNSTVYANTSRNYPILSKIVPPNDGLYFPNYVWFNTSSNLGLEMAPLTDTDMSKNQKVVSNHFYDIYTNNKEIFVFMK

SEQ ID NO: 6115 - protein, 325 aa, Enterococcus faecalis
RRLDMTTIHEFPKNYERFIAQGEEALVEHNQIAALENFQQAYQLQQTPPVNQKIVQLLLEMGEADEALALAEAFQESYFENLETAAIYMQIYSQSRRFIEGYILLKQLLQTKKITLAQQKTLEQQLMQVEEAYQQLETQQIQAIKRNLLVSDQLPVYQQLANIKTSLYLPKPVFVEVAKDLVMNQALSYFAREWFIEELALLQFSEPLTFLWYDNQPQTVLLEGKTGPLNTPIYSEICTELRNRLENDDPIMLQHLEEEIRLHLAYLYPLAETVISDPTIWVLGYLATYYPEYIEKELTEAKGHQIDAVQKVQQAIRTAFTQIML

SEQ ID NO: 6116 - protein, 96 aa, Enterococcus faecalis
MENQVEVMTYAHLKEIMQALEANEAITEDTKVFIDTGWDSVQEVAPDAVSIEKVAKFTVADVLTNESFAGYSLEEKAEKMNAEGDLETAIIIRNLY

SEQ ID NO: 6117 - protein, 427 aa, Enterococcus faecalis
KVLIYLTKKDCELFDMDQFSTLTEQEFTTFAMTHPAGNFLETPEMKHLLERRGWHCEYVGVKREGQLIAACILSKKKVKIGYAFDIDGGILMDYTDKKCVEAFFTGLKKYVKKNDGLYLTFTPNKQICLRDFNGGEVEKVNQETFDYFTSIGFEHQGFDVHNFDGAPRWLFVKDMAGLTEEDLWKSYGKDAKYDIKKTWEYGVTIRELRYEELPLFKKLTEETSARRNFEDKDLAYYQAVYEEFGERAKFMVAELNFATYLENLHEKLRKLQETLNEVNEALIANPKSRKKNNQKREFEDEVRTVRKRIDEAKEMKTSDEPEILAGALFIVHPQEVVYLFSGTYEKYKQYYAPYLIQHKMLTYTVENNIPKYNFYGVDGIFDGSDGVLKFKQSFGGHVEELMGNFQWKAKPMKYALYHALKTIKEKV

SEQ ID NO: 6118 - protein, 64 aa, Enterococcus faecalis
ISTFQLNLLFAFFQTKLPHWLILIFQFLLIISNFAKMQTVFNGKKEFLWNLSFLTEYLSFIKNI

SEQ ID NO: 6119 - protein, 176 aa, Enterococcus faecalis
GHCCVHANEHDSKHRFNIEGMRKQRFDFPTSKNVLLAAKAAGYIGNQDTYWLLFDKLQEGLFVRSLNIEEPEVIEKLVKETTIDFALWKEAVASEAVWTAVQEDFALASAYGLQGVPALIINQKYLINGAVPKQQISQTIQKILAEEKQQQPLVSLTPSSEESASCEFKEGTWTCH

SEQ ID NO: 6120 - protein, 136 aa, Enterococcus faecalis
CGGDNMFNAYREYWNNITTMNASATRAQYWWPQLINYLVLGIYSAITGVYRYIEVTPNDGTIIKEWNTVTIIFFLLTALIWLANFTVRARRLHDRDHSNWWILFYLLPFIGTLVIFITLILPSKSHTRWPVNQSEI

SEQ ID NO: 6121 - protein, 517 aa, Enterococcus faecalis
SDNYYTEKELIKSHQLSYQAVSFLKLRYCFDDCFIKVKDLGGNNMIRFLEKNYRKMEEIIRVLSISDKWMTKKELAKYIGSSESTFIRYIEEIKQRWGESLTIKTSHKLGYRLENFNVSLYLNVLTDMAKTSTTTQLLHEFIQNPGKTIEYYCDTINISRSSFARKLKQCNQVLETYSLRVIVDQGYQLTSQTEELPLRIFTTFFFLMYYGHYELPYQLDKQEIKQLMRRNQCQLNIISMDNSYEHDFFIMYFIVDLLREHQGFQQRFQKKTDKKSPIKMEDYLLLSRHFTGLSRETYREVLRYFQRGAFQQYYSEDQEVISQRIRENLKFNAFSQIEQLTEEVVDFAVHLLTCLYLFSQLVPFDTSELTQRATFFTRQIHFTQLHLYERLKAELHFFSALLETNLLNYSSSYIFWLLNTFPEINQSFDSKKILIISDMGLNHSQYIGNYVHDILALHRIRSNTLAITEEQLGDHRLEEFDLIITNQPIIETSVPSILINDAILFSNKRELLDLLNF

SEQ ID NO: 6122 - protein, 1154 aa, Enterococcus faecalis
LLIHKRKERTDIKLLKKFGVFGVVFLLVSSYFIPLIGYAETAKEVEITSAQMITDENDKTNINIELNLLNQTEQPLQREIQLKNAQFMDTAVIEKDGYSYQVTNGTLYLTLDAQVKKPVQLSLAVEQSSLQTAQPPKLLYENNEYDVSVTSEKITVEDSAKESTEPEKITVPENTKETNKNDSAPEKTEQPTATEEVTNPFAEARMAPATLRANLALPLIAPQYTTDNSGTYPTANWQPTGNQNVLNHQGNKDGSAQWDGQTSWNGDPTNRTNSYIEYGGTGDQADYAIRKYARETTTPGLFDVYLNVRGNVQKEITPLDLVLVVDWSGSMNENNRIGEVQKGVNRFVDTLADSGITNNINMGYVGYSSDGYNNNAIQMGPFDTVKNPIKNITPSSTRGGTFTQKALRDAGDMLATPNGHKKVIVLLTDGVPTFSYKVSRVQTEADGRFYGTQFTNLQDQPGSTSYISGSYKAPDQNNINKRINSTFIATIGEAMALKQRGIEIHGLGIQLQSDPRANLSKQQVEDKMREMVSADENGDLYYESADYAPDISDYLAKKAVQISGTVVNGKVVDPIAEPFKYEPNTLSMKSVGPVQVQTLPEVSLTGATINSNEIYLGKGQEIQIHYQVRIQTESENFKPDFWYQMNGRTTFQPLATAPEKVDFGVPSGKAPGVKLNVKKIWEEYDQDPTSRPDNVIYEISRKQVTDTANWQTGYIKLSKPENDTSNSWERKNVTQLSKTADESYQEVLGLPQYNNQGQAFNYQTTRELAVPGYSQEKIDDTTWKNTKQFKPLDLKVIKNSSSGEKNLVGAVFELSGKNVQTTLVDNKDGSYSLPKDVRLQKGERYTLTEVKAPAGHELGKKTTWQIEVSEQGKVSIDGQEVTTTNQVIPLEIENKFSSLPIRIRKYTMQNGKQVNLAEATFALQRKNAQGSYQTVATQKTDTTGLSYFKISEPGEYRMVEQSGPLGYDTLAGNYEFTVDKYGKIHYAGKNIEENAPEWTLTHQNNLKPFDLTVHKKADNQTPLKGAKFRLTGPDTDIELPKDGKETDTFVFENLKPGKYVLTETFTPEGYQGLKEPIELIIREDGSVTIDGEKVADVLISGEKNNQITLDVTNQAKVPLPETGGIGRLWFYLIAISTFVIAGVYLFIRRPEGSV

SEQ ID NO: 6123 - protein, 477 aa, Enterococcus faecalis
SMKNARWLSICVMLLALFGFSQQALAEASQASVQVTLHKLLFPDGQLPEQQQNTGEEGTLLQNYRGLNDVTYQVYDVTDPFYQLRSEGKTVQEAQRQLAETGATNRKPIAEDKTQTINGEDGVVSFSLASKDSQQRDKAYLFVEAEAPEVVKEKASNLVVILPVQDPQGQSLTHIHLYPKNEENAYDLPPLEKTVLDKQQGFNQGEHINYQLTTQIPANILGYQEFRLSDKADTTLTLLPESIEVKVAGKTVTTGYTLTTQKHGFTLDFSIKDLQNFANQTMTVSYQMRLEKTAEPDTAINNEGQLVTDKHTLTKRATVRTGGKSFVKVDSENAKITLPEAVFIVKNQAGEYLNETANGYRWQKEKALAKKFTSNQAGEFSVKGLKDGQYFLEEISAPKGYLLNQTEIPFTVGKNSYATNGQRTAPLHVINKKVKESGFLPKTNEERSIWLTIAGLLIIGMVVIWLFYQKQKRGERK

SEQ ID NO: 6124 - protein, 659 aa, Enterococcus faecalis
RTFYLVDDCRPANHWDGSHLAILSKTKKRREKMKQLKKVWYTVSTLLLILPLFTSVLGTTTAFAEENGESAQLVIHKKKMTDLPDPLIQNSGKEMSEFDKYQGLADVTFSIYNVTNEFYEQRAAGASVDAAKQAVQSLTPGKPVAQGTTDANGNVTVQLPKKQNGKDAVYTIKEEPKEGVVAATNMVVAFPVYEMIKQTDGSYKYGTEELAVVHIYPKNVVANDGSLHVKKVGTAENEGLNGAEFVISKSEGSPGTVKYIQGVKDGLYTWTTDKEQAKRFITGKSYEIGENDFTEAENGTGELTVKNLEVGSYILEEVKAPNNAELIENQTKTPFTIEANNQTPVEKTVKNDTSKVDKTTPSLDGKDVAIGEKIKYQISVNIPLGIADKEGDANKYVKFNLVDKHDAALTFDNVTSGEYAYALYDGDTVIAPENYQVTEQANGFTVAVNPAYIPTLTPGGTLKFVYFMHLNEKADPTKGFKNEANVDNGHTDDQTPPTVEVVTGGKRFIKVDGDVTATQALAGASFVVRDQNSDTANYLKIDETTKAATWVKTKAEATTFTTTADGLVDITGLKYGTYYLEETVAPDDYVLLTNRIEFVVNEQSYGTTENLVSPEKVPNKHKGTLPSTGGKGIYVYLGSGAVLLLIAGVYFARRRKENA

SEQ ID NO: 6125 - protein, 315 aa, Enterococcus faecalis
FLASPKKFLEKQRAWANHCPRLSCFIFKEEAMKSKKKRRIIDGFMILLLIIGIGAFAYPFVSDALNNYLDQQIIAHYQAKASQENTKEMAELQEKMEKKNQELAKKGSNPGLDPFSETQKTTKKPDKSYFESHTIGVLTIPKINVRLPIFDKTNALLLEKGSSLLEGTSYPTGGTNTHAVISGHRGLPQAKLFTDLPELKKGDEFYIEVNGKTLAYQVDQIKTVEPTDTKDLHIESGQDLVTLLTCTPYMINSHRLLVRGHRIPYQPEKAAAGMKKVAQQQNLLLWTLLLIACALIISGFIIWYKRRKKTTRKPK

SEQ ID NO: 6126 - protein, 114 aa, Enterococcus faecalis
RVDKNRFIISDKKWWFIMRAKLFLILRNRVLSRVVFVILFLHVLFTTNDFTVLLLLLLLNYLLTLEDSAKKNRKIQTWQEFKQSIDWPFVAFYSGLALLVISLILLFLWFNYAR

SEQ ID NO: 6127 - protein, 85 aa, Enterococcus faecalis
IKNKRVTLGLSNLEGVLKMKYLDIIALILLIVGGLNWLLVGAFNFDLVATISGGATTPLAKIIYIIVGICAIYSIKFLAPLFREP

SEQ ID NO: 6128 - protein, 209 aa, Enterococcus faecalis
  MISC_FEATURE (198)..(198): Amino acid 198 is Xaa wherein Xaa = any amino acid.
EKSALGYIGKYKHQIGISMINYLFPCYDYNKEKESRDLFMELQVTKKAKFFCLAMALLMTLGIFISAGTSVYASDQLEDSEVEAVAKGLEEMYANGVTEDNFKNYVKNNFAQQEISSVEEELNVNISDASTVVQARFNWNALGSCVANKIKDEFFAMISISAIVKAAQKKAWKELAVTVLRFAKANGLKTNAIIVAGXLALWAVQCGLS

SEQ ID NO: 6129 - protein, 257 aa, Enterococcus faecalis
TLFYYWILLLCVTIEEPNRRYFLLQGEKMLKTAYQRSPKQELAKNTPFFNETDLTHSFIIDFENQEFIHHQAEPLNYLFYLIKGKAKILKTERNGRQSIVQFLTAGDLIGDLTLVQAETITKDVIALGETCCLAVPLAYAETVLKNKVLFMQQLSHYLGKKMLQRVDHFTTNQTYELSYRLAELLLVAANHEDVYKEKHTEIAEYLGVSYRHLIYTFKQFRERGFIQKQGTAYHINRLALHSFVTKTEELVLNTGCD

SEQ ID NO: 6130 - protein, 63 aa, Enterococcus faecalis
KEFPTKSKEQFYPNNFGNQGTQLMGIRKNLGQNQTPFNPTKIINCPGFYGAYLTTHKGLKRGN

SEQ ID NO: 6131 - protein, 162 aa, Enterococcus faecalis
ANPLVKTSTKMLQNEETVRYVFLKNQTIAETRQNIAKFFMGEPLGKYGIEVKETGEMIGTIDLRVYETHNIGELGYVLNRTFWGNGYMPEAATALVELGFAKMKLMRIFALHDQDNPSSGRVMEKIGFTYEGTLPNARISKGKIVTDVYRGMTLETWQNRPK

SEQ ID NO: 6132 - protein, 195 aa, Enterococcus faecalis
FAAFEVAGLDERMAVIRAQIQPIFQELDTYFAEQLAPELGTELFVHIAQHRRRTVYPPENTWSALSPNKRGYKMQPHFQLGIWGDYVFMWLSFIDNPKNEKQIAQAFLENQQLFQALPEDTYVSLDHTVPQITPLPETDLEKALTRFRDVKKGEFEIGRIIPKDSDLWQNPEKARAYMLATYQQLLPLYQLAVAQ

SEQ ID NO: 6133 - protein, 1439 aa, Enterococcus faecalis
LVLSEWSRERRDDMKQTKWQRLATIGLCSSLVINAFSGATAVAETITIESSPTVASSAKEATSASSATPESTESSQETTETSREEVTQETVEQEDTTEIAQEENLLEPSGIQAKIMPRAFVWAATGTTNRTTVRLNDVVDYRMKLENITTDDTNSDIVGPIRIESKLAAGMTRPTSVIIKVGPEEQNVVIGEGSHNANSGGEYFVWTESTRTVTAFINRLHGRTSGNTGYIKTLYFQTRITSGTHNEKKYIDSTIRFNGFGAVNRRNEMTYVDRFSGNLGLKGNLKFYDEDGVASKEQMSLSINPVLFKSTNSRVEGTLLRYPLTMTNAGSGLYRFDTGLKNIGTSNGGSWFFFSNDIAINFATATTNRIDKIVLAPPKATLPDSRTGVMTSRAYTSTTYTRSNYDISTYNFTKATGKTWRITNRSSNSGVSTNIMFSNNLVGTTGQFNKGNSGATINYYIYYKKLYENFVNSNGQKITPPSGFTQGKRTVINSEAYTFKQSGTLPDTYQADGKTYKFKGWYKGKTKPNTLTTTKAPSYAVTYNNDDDLTVVYEEIEFFDFPALTYQFGFVDESGKRVDASTIGLTYDKWRGELLTNNVNDWKTVSLEKGQVAPTKNNLKEIAYPAQSLEILSDRSTQYSAANLTFTLPKYYGKISVYNKSGTFDAGYLFPNIQNNNSSEPSVEGLHKNLSSWFELKKSGNQSFVFNKPIPAAPIDVQVPAYLREIVYNPDLISNTAVYYVIDKPVYYYLTNRKVTENFVDTSGAKITPPTGFTQGKQTAITSDPYTFKQAGTLPDTYTTGGKTYKFKGWYKGKTKTEPLTTTKAPSYGVTYNDNDDLNVVYEEVTAIYPGFYAQFVDEQGKAFTNSLTLSENYTEFLRKTGTTVFETKGAFYPMVGKRDATVTNKYKIETTSSVAVPNNYWTAMPADIANRGYALNNLDITNQMKYVDKIETTDTHTTMYDYTGVSDIGGKPNNASQTELNPIDKTFVKQTDNTFAIKSIWGNGTFSHIVPKMLLLAESGSFSRLFGFDGTPDYKQTVNYKVTRKQVTENFVDANGAKITAPTGFTQGNKIPMTSNTFKYTAAKALPATYTAGGKTYTFQGWYKGKTKPNTLTTSTTPTYNTTFDGNDDMTAIYKEEVPKASVALTRTTAETVTSGGNVTWRATITNTSQAPLTTATIKKSTAWTTGLAAPTAMIVTPAGGTAKTVPVTATTWTNGVSLGTDIPVGKSATVQFTTKATGTAGQVLRAGITTSGNYSGVSTSATVRVKDNDQAIVTPTAEGFISVPTFNFGQVGVAGSTQQHSLKKAADYYGNGTRNPYLRIKKTQANWSLTAQLSQPKSATDSLPTATRLLLGAAPVSSFSNYNQPTELKNAVGTTSAISLNANNTATRIIANQQFTGSNIYQLDFTFNNVKLEVPANQGVKGQQYQAAITWNLVTGP

SEQ ID NO: 6134 - protein, 97 aa, Enterococcus faecalis
TVADFPTGMSVPKLTPLVHVVAVTGTVFAVPPAGVTIMAVGAAKPVVQAVDFLMVAVVSGAWLVLVIVARQVTLPPLVTVSAVVRVKATLALGTSSL

SEQ ID NO: 6135 - protein, 72 aa, Enterococcus faecalis
VPRNCGLVLLPLDPLVGWHFKFDIVEGEVQLIDITPSELLIGNNPSGRVVGIQTNGTRSTDRIFQLGRLVVI

SEQ ID NO: 6136 - protein, 1106 aa, Enterococcus faecalis
PSSAWREWYIERRDDMKRINWQRLATIGLCSSLVINAFFGVTAIAETVTSESSPTVANSIKEATPASSARQESTESSQETTETSREKVTQETAKQAETKAPLETPEIKTNTTAQPAENSSENDRQTSISPRWVPNNQVIYPRITLAFTNESGQAFADENLTLSGTYTKFGYEDATSLWRPYAVNYPITSSNAGGGQYRVAVNATVPLPYDFFTDLPANYRMNIYAVEQLKIDNTLKYVDSIVAVPDSTLRMTRYSAQQTTELPQFGNHMTPFVLRTRDSIFSKSSENVFSLNTDGNEFLRILSVAPIGTPVEPVLYGFDGTATYRETLNYVVTRKQVTEKFVDANGVAITPPTGFTQNKKTPMTSNDFTFKQASTLPDTYQADGKTYKFKGWYKGKTKPNTLTTTKAPSYAVTYDGNDDLTVVYEAIQEGKGMSSVQVMNKAIQNPVTLPDRMYRVLFINETGGLTFADRYGFTGELVEVADGKVTPIGPVPTNNNSAVKEITIPGRVFDTERPTPLQYGVRNATFTLPKMYKTVTYQPGPNYTGTAYSIPETYRLSLRSGVKSDIDTTGWRIGLDPTTDPQKFTMSGIYWSSMPINVRLATLLSATITGKGVEPSVYTLDENARMYLYLENRRVTENFVDTNGTKITAPSGFAQGKKTVITSDSYTFKQSGDLPDTYKVGTKTYQFKGWYKGKNKPDTLTTTKAPSYPVTYNDDDDLTVVYEEVVMKTYNLPAKDVYFGYVDEADNLLNTAGFSVEAELGESDETESTVLGKIQGTDEVMSKLKKLSIPGKSYDFPIDKLKTYGARSVNHTIPKQYKTMSITPLATYTGDKTKYPMSKEIRKNIEAPYTVVSQADGAEAFKLTDAGTFFRTRRAFWTWDPNNTLYAMGIYSGTVGKNYNLASPEGTIYYYLENRRVTENFVDPSGAKITPPTGFTQGKQTVIDSDNFTYASTKALPDTYTTGDKFYKFRGWYKGKTKPGTLTTTKTPSYAVTYDDKDDMTAVYEEVQPTAEMTVSRLLEVIPNEAFMVWTVRLKNTSEVPLTNVKIAPTAKWAAGISPPTQLAVRIGNTPNKIIPVTAEQWQAGVNLDIEIHVNGAALVTIHHGM

SEQ ID NO: 6137 - protein, 129 aa, Enterococcus faecalis
MEIRQDGYEVNDKEVTKTMLAEKVDTGKFPESTKFTFAEINYDKDENINGKHNEDLKEKNQTLTPKKVPTTPRTPKQPETPTVPSGYQESSPTVKTFPQTGEKNSNVLLFIGFTLIFATAGYYFWNRRN

SEQ ID NO: 6138 - protein, 109 aa, Enterococcus faecalis
KEEKKMELKFVVPDMAETFGKLSYAGEGEILTEGYGRNTTVIGRSYHLYSSKQRADDIEVVVAAEAGEKDFDQDQPLKAVNPHLVAKGYEIENRGFTDYVLYVDDLVKE

SEQ ID NO: 6139 - protein, 128 aa, Enterococcus faecalis
EEKKMRLTEGIVVDSGLTFGKLRFSALRREVRKQNEDGTVSNEVKERTYNLKSSAQGRMIQVSIPANVPLREFAYDAEVELVNPIVDTVANYVFREGTTVNWFIKADDLVLKRQPNQGNCTNQIEGKK

SEQ ID NO: 6140 - protein, 117 aa, Enterococcus faecalis
VKIMEINVEHILDCLDQYGKGELTEEQLVKALTYDEKMFLIMHQGLLGENSDSEDDFDVQDWLEEEESFFMVVEVNENLCRQAESVLEEIGVEMPDAIEGFLNQLVEKKQFPVVINS

SEQ ID NO: 6141 - protein, 345 aa, Enterococcus faecalis
SEVETIKMYKEHRIRARDQHLVYHFILGWLIALLISWMGVFYFQEFRQFDISRVSLSTIETVWSMKELICLLGSLGFSGAMLLLYIHFFPDHWRSLWHRQKLARMILENHWYEVKQTQSEGFFKDLNSSRTRETISYFPKIYYRMKEGLLSIRVQISLGKYQEQLLKLEKKLESGLYCELVEKELKDSYVEYTLLYDMIANRIGIDEVVAENGTLRLMKNQVWAYDSLPHMLIAGGTGGGKTYFLLTIIEALLKSDAELFILDPKNADLADLGTVMPHVYSQKEEISACVEDFYERMIARSKAMKEMPNYKPGENYAYLGLPPNFLIFDEYVAYMGANRFPTSIE

SEQ ID NO: 6142 - protein, 81 aa, Enterococcus faecalis
ACEIIASSLAIPIFISWNLTRRYFTIRPYVPIFRQDQPFRPVHSQIRQSFSDILTIVIFFSRPPYSQPYAQTLRQISDDFT

SEQ ID NO: 6143 - protein, 409 aa, Enterococcus faecalis
VYLITMNVETDEVQGSGKNVGKSVMEVPRLNTKIRYWEYYDLQETFDQLFTQSKNGKKFYQLYELIISENNILLAYRTIKANKGSSTPGTDSFTIDNYKEMNQAEFIHLILSQLENYKPKSIKRVMIPKPNGEKRPLGIPCMIDRIIQQMFKQVLEPICEAKFYEHSYGFRPLRSAKHALGRIMYLINISKMHYAVDIDIKGFFDNVNHRLLIKQLWNIGICDKRVLAILSKSLKSPIQGEGISSKGTIQGGIISPLLSNVVLNDLDHWVSKQWHTFETKYPYTKGYNKFRALRDTNLKQGYIVRYADDFKIMTNDYPSALKWFHAVKLYLKDRLKLDISNEKSKIVNLRKRKSEFLGFTICVKQKGKNGFVIRIFLTKRKIKLKKRLNKELKIFKRALQHKMLSYLML

SEQ ID NO: 6144 - protein, 278 aa, Enterococcus faecalis
TQIGIFRIHHLRETKGEKWVCNSHISDKKKNQIKKEIKQRIKDIQKSPTAQNALLFNALVLGVHNYFRYATHINLDLNRMNYVLSFTTYNRLSNCSTRCYPNKASPTYKKFYSTTMKTYKVAGVYLYPLCDVSTKTIYGFNTEDTPFTPFGRQRLEHKSLQSLVYQELRKLMESKILNRMVEYLDNRISRYSMKSGKCEITKQFLPAKAVHCHHYLPKSLGGDDKFDNLRIIHKDIHLLIHTTNKMIIDHYVNELKLLPEQIAKINLYRKMCNLQNIQ

SEQ ID NO: 6145 - protein, 87 aa, Enterococcus faecalis
SPSFPPLHTVREPFTSYGVPSIYFLLNVLQITHFSIKVDFCYLLWQQFQFIDVVIDYHFICGMDQKMDILMNNSQVIKFVVSTKTFW

SEQ ID NO: 6146 - protein, 118 aa, Enterococcus faecalis
MLTTKESAVILNKLKQIVMLGRQSGFFLILACQRPDAKYLGDGIRDQFNFRVALGRMSELGYSMMFGEVDKNFFMKRIKGRGYVDTGGSVISEFYTPLVPKGYDFLESIKQVAQSKEK

SEQ ID NO: 6147 - protein, 154 aa, Enterococcus faecalis
RCQGGAIKMTEDDSLQYAKENKKEIISSVIDGKEKEEEKTAIFMAGSPGAGKTEAAQTLTVLNSNLCVIDADKFRVLFPGYVGNNSDEFQRGSSLLVDAALDLVLKKGYSFILDATFATSKVKQNIERALKKNYNVLVYYVYQDPFIAWDFTKK

SEQ ID NO: 6148 - protein, 70 aa, Enterococcus faecalis
HCQSVIQKKYWRKSYMTEKEKVEEIMEKYNRNFSTLQKNASAKELKTVFKFVADESNRKQRELIGLDKEK

SEQ ID NO: 6149 - protein, 402 aa, Enterococcus faecalis
HLEFGGENLVQRNLDYRLLKDRRNEYGISQNKLATACGLSRPYLNQIENGGVTASTKTMRKIFNQLESFNPDLPLSLLFDYVRIRFPTTDARKIIQEILHLKFDYMLHEDYAFYSYQEQYVMGDIVVMLSHEEDKGVLLELKGRGCRQFETFLLAQKRSWYDFFEDCLKAGGVMKRLDLAINDLVGLLDIPDLTKKCQKEECISLFRTFKSYRSGELLKADEKDGMGNTLYIGSLKSEVYFCLYEKDYEQYIKLGIPLDKTETKNRFEIRLKNDRAYHAIQDLLKGRSIESTTFSIINRYLRFADKVEGKRRTNWPLNEQWGRFIGRNRKEIQLTSEPKPYTIERTLNWLGRQVAPTWKMAKELDRLNQTTYIQDMVQNARLSDRHKKILEQQSMAIENLII

SEQ ID NO: 6150 - protein, 437 aa, Enterococcus faecalis
FWDIPQYPSNFRIINERRSFHMKLFVGLDVSSEKLDACFMTDDSTCSVLKEASYGNSQLGASQIKEYILEFSQKFEIESLVIGMEATSLYSFHPAMFFKEDLELNQLNLMVSVEQPNKIKKYRDIFEENKNDQIDAFYIADYFRIQRQVNSIIKEEEYLALQHLTRTRYQLIKQLVRTKQHFIENIYYKCNTLSKELKAEGGSVLSATLVTLMTEDYTMDQLAELSLEEFANLIQKLGKYRFKNPEGIAKAISKAIRSSYRLGKVHQDSVDIVLGVLAKEIRSLEKLIKDLDKAIDDLVVVLPEYQCLTSIPGIGPVYAAGILAEIGPINRFSDESKLAKYAGLYWRQNQSGNSEYENTPMAKRGNRYLRYYLVEATNSVRRYEPEYHAYYKKKYAETPKHKHKRAIVLTARKFTRLVDTLLRNHQLYMPPRSVIDK

SEQ ID NO: 6151 - protein, 84 aa, Enterococcus faecalis
FHVEGPPFIDYSEIAWVLWDIPESRCLTTASHNRVSFIKPLSHPISTRIGRGQWTQLVCWRLYQRFGSQTFCRSKTAEGDSVFP

SEQ ID NO: 6152 - protein, 86 aa, Enterococcus faecalis
KFLQNIYYEESDKMNFGQNLYQWFLTNAQSLVLLAIVVIGLFLGFKREFSKLIGFLVIALIAVGLVFNASGVKDVLLNLFNRIVGA

SEQ ID NO: 6153 - protein, 171 aa, Enterococcus faecalis
GGVTMEQMRVYIANLGRYNEGELVGAWFTPPVDFDEIKERIGLNNEYEEYAIHDYELPFEIDEYTPIEEINRLCGLAEELEGTPIGEVASEIQHAFFNSFEEMVEHLDNIVYYPDCNDMSDLAYYLIEEAGALGEVPTHLQNYIDYEAYGRDLEIEGNYLVTSRGVFELCE

SEQ ID NO: 6154 - protein, 282 aa, Enterococcus faecalis
YFKGVEVVNIDEAKQLANYFSDGSPGYILEFNNLEWDLYTKKIVGFGIQERFGGSKGNSFKEFLVSEDISDHLKFKLIYSLNETMKQIASIRQFENPSSYKSPKMNPLVTLLIEEAYHKKDSARLLNGTKFSKEVNLEYIQQLPTRISKDIQNKDFDSVLTKSNTMIDEVLKYIIENTKGKSIDNNTVRSKDLRNQAFERLNIKIDKDMDKRIKALVGALNTLSDKILEMRNSQGDAHAQGSRRIVINEEEAILTANSAMILCEYLFRKYEKRKRFSDAKES

SEQ ID NO: 6155 - protein, 248 aa, Enterococcus faecalis
FFMEVYMQNLITMASGTLNEVYSGTEIATLFAEYGAEFNSSVPFISTPFPNFTSKATAIQNNLQSFTEEQQFKIIKELCESVLAQNPANKDVAKILKLLLKNYGSVYSNDKIDRNIINETNTWLTASSRAKEEFEKAIQSYDNSIYNRYTLDSIRLAFEFFMQDILKNSKSLENQPIEGELLPLLRKKGIPKEIINLVRLIIKGLISYQNENVKHSQTFTDLEVEFVIEQTSILMKLFAKIEKIENES

SEQ ID NO: 6156 - protein, 135 aa, Enterococcus faecalis
KVSRLNMKKIKSYTSIWAVEKVIYAINDFQLPFPVTFNQMAWFVLSLLYVIVFAHVPPLSMIEGAFLKYLGIPVVVTWFMSQKTFDGKKPLGFLRSFLSYHLRFKVTFAGKKVKEQKKRWDEPITLVRSVNYVPD

SEQ ID NO: 6157 - protein, 816 aa, Enterococcus faecalis
TMYPIKYVENNLVFNQEGECFAYYELVPYNYSFLSPEQKYQVHDNFRQLIAQNREGKIHALQIATESSIRATQERSKKEITGRLKEVAKQRIDLQTDALVSMIGDSQIDYRFFIGFKLIATDEEVNLKSLKKSFLSGLQEFVYGVNHHLMGDFVSLSNEEIRRYTKLEKLMESKLARRFKVRRVTPSDLTYLIEHIYGEKGTPFEEYEFQLPKKKLKSETLVKRYDLLHPSRCLIEENPRYLRMEHENHESYVAYLTINTIVGEMEFPSSELFYYQQQQFTFPIDTSMNVEIVTNKKALATVRNKKKELKDLDNHAYQSDNETNSNVLDALDSVNELETTLDQSKESMYKLSYVVRVSAESVDELKRRCDEVFDFYDDTNVKLVRPFGDMMGLHEEFLPSSKRYMNDYIQYVTSDFLAGLGFGATQKLGELEGIYFGYNVDTGRNVYLKPALASQGVKGSVTNALAAAFLGSLGGGKSFSNNLLVYYAVLFGGQAVIVDPKGERGGWKENLPEIADEINILNLTSKPENQGLLDPYVIMKKKKDSESLAIDILTFLTGISSRDGEKFPVLRKAIRTVTQSDQRGLLQVINELRKENSPVAENIADHIESFTDYDFAHLLFSDGSITQSISLDKQLNIIQVADLVLPDAETTFEEYTTMELLSVSMLIVISTFALDFIHSNREIFKIVDLDEAWSFLQVAQGKTLSNKLVRAGRAMNAGVYFVTQNSDDLLDERLKNNIGLKFAFRSTDIHEIKKTLEFFGLDQEDESNQKRLRDLENGQCLMQDLYGRVGVVQVHPVFEELFHAFDTRPPVQERME

SEQ ID NO: 6158 - protein, 195 aa, Enterococcus faecalis
AWFRYIQSLKNSSMPLIPVHLFKREWSEGMKKKLFRIVGIVFISILTLIVLLSLVGTVAEATGLVDDTVESGNLYSKYSLNNYQLDFFVDSSWDWLPWNWGDGLGKSVMYGLYAITNFIWTVSLYLSNATGYVVQEAYKLDFISDTARSIGKNIQTLADITENGLQTSGFYFGFLLLMIVPVGVYVEYDLTTNIE

SEQ ID NO: 6159 - protein, 666 aa, Enterococcus faecalis
TELVNSPTPVSVNRMMNLLKVSRRTVYRELENLETSLASMGATLEKVARGRFSIQADEAAMTEIQAAILGEETQELSTLARQHAILLTLLQTKEPVSMHYFLETYCISNTTFYADIKQLETRIARIPLTIARNQGYEVTGSEKYRRLLMANILSMEINEYQFFHFTELTTNDHFFFQFIHAEHLAFAQKIVQPEVETLFPALSDRKLQHLILMLTIAMDRVTAGFYLADETYTGQMNKAFLNCSKRLFSKVAAETKQLYAVSEIVFFASLLSDFSNSFDEDFFDEHFDTQLAYEVKQLIEAVSQETEVNFFEDTNLYKMLLTHLSGVFSRAVLQEEDLTNPILERIMNQYQEIAAALRQALPQIFPQKNLSEEEIAYMVLHFANSLERSPKIMEVDIAGFSPSGLASTSMLEMRLRRYFPFINQIHFFRIADLGKVNVEENYDLVISTSLLPGYNGKYKLISPLLLDDEIRQLKEEFKRISHEKRSLRKAPVKKIGGEESYETVVAFMEEISKLLETFFIADLNNQADLAETVQQALAQLSADLITDSAIVCQQLMKRYEQAPIGIPQTEMALFHTSSTAVTQPVFCIFNLAQPLMIEGMDKKPMQLQRMLLMLAPIPIDETIGKILGKISGAIIMNDLNTEIFHSGNEAIVYQLLSSLLIEEMKG

SEQ ID NO: 6160 - protein, 145 aa, Enterococcus faecalis
EMFEITAEQIMLNQSYASWEEALAASGELLLKNQLVTPDYVKAMYQRQQKVSVYIGNFVALPHAEGQDEQVLKEGICFIQVPDGVNFGTEADRKIATLLFVVALKSQRQLSMLQELAFFCSDLENIQRLSDCRTIDEAQKILAQA

SEQ ID NO: 6161 - protein, 676 aa, Enterococcus faecalis
QSRTCDAPPFEASRQFEYSIKSCSFIIEIIINGISTCFLVFVTREHVLFSFNFWHNGLCQSTTFSRFGKRIQFSQQEKLLERRGIKMEQVPEKNKVSIKAKVQRIGSTLSSMVMPNIGALIAWGVLTALFIPDGYLPNKAFATMVGPMLTYLIPLLIGYTGGKVIAGDRGAVVGAIATMGVIVGTDIPMMLGAMIMGPLGGFTIKKFDQYFQHRIKAGFEMLVNNFSAGLIGFALALLGFSAIGPIVDALTAAMARGVEIILNAHLIPLTSIFIEPAKVLFLNNAINHGILTPLGTEQVLSAGKSILFLLEANPGPGLGVLLAFMFFGKGAAKSSAPGAIIIHFLGGIHEIYFPYVMMKPLLFLSVIAGGATGSLVFQTLDAGLRAPASPGSIIAILAMTPMGSYLPVILGVLAATAVSFAVSAVILKADAKEESDEFAQKVKETQAAKAASKGLTVTNGSASLSGIQQIIFACDAGMGSSAMGASILRKKVQEAGLVQTVTNRAINNLTDEGNTLIVTQAELQERAKQKAPNATFVAVENFLNSPRYDEIVAELSGTKEKNDAQPTVSKATPASEIEGDLANVNEILLVHDDRVGSATMGMKVLEEILDKEKISMPIRKININELTQQTQALIVTKAELTEQARKKAPKATHLSVKSMVNPQKYETVVSLLKESA

SEQ ID NO: 6162 - protein, 161 aa, Enterococcus faecalis
NSGFALKRKCLERKKTMENLTNISIELNQQFNTKEEAIRFCGEKLVEAGCVEPAYIEAMIERDQLLSVYMGNFIAIPHGTEEAKKLVKKSGICVVQVPEGVNFGTEEDEKIATVLFGIAGVGEEHLQLVQQIALYCSDMDNVVQLADALSKEEITENLAIA

SEQ ID NO: 6163 - protein, 400 aa, Enterococcus faecalis
RRNNRKFSHCLKERIRMNAVHFGAGNIGRGFIGEILAKNGFHITFVDVNETIIQALKERKSYTIELADASHQQINVENVTGLNNMTEPEKVVEAIAEADLVTTAIGPNILPRIAELIAQGIDARAEANCQKPLDIIACENMIGGSTFLAEEVAKYLKNPAYAEQWIGFPDAAVDRIVPLQKHEDPLFVQVEPFCEWVIDDTNRKAKEIQLEGVHYVADLEPYIERKLFSVNTGHATVAYTGALLGYQTIDEAMQDALVVAQLKSVLQETGKLLVAKWNFDEQEHAAYIEKIIQRFQNKYISDAITRVARTPIRKLGAQERFIRPIRELQERNLVSPHLLAMIGIVFNYHDPEDEQSRQLQEMLDQESVDTVIAEVTGIEDPETVKNIKQNVERYARPQVA

SEQ ID NO: 6164 - protein, 397 aa, Enterococcus faecalis
QVISQSSLSRGGFFVLQYNCSKERRSMKKIAIIGGGIIGMTLANYLDPQKFDITVYDEGLGQATKASAGIISPWLSKRRNKKWYQLAREGAALFPKLVKDFQLTEDIYRQSGTVILRPAAALADLAHLAEERKQTAPEIGEITMLSAVQTAKFLPLLKETPSLFISGGGRLDGPAYLNHLQKRAEAKGVTFCSQRAHFRQLNQGWEIVTNSEKKSVDFLALTPGPHLKELLTTLNLSVDIRPQKGQLLVFETPFTNSQQWPVAMLDGEADLIPFNQGKILLGATHENEQAWDLEETVSAFQQLTSGTAPFLKEAEQLFKQPMHYRVGTRAYTSDFAPFFGPLPEMPHLVVASGLGSSGLTTGPFIGYQLAEYFNTGAFKGELYQKPLSQYVKNNPSL

SEQ ID NO: 6165 - protein, 215 aa, Enterococcus faecalis
GLAMKVIIFGGSGFLGQQIAKILVQRQHQVISVSRHGKPATLSASWSHQVQWVCSDVTHDTNWQEQVQRADWVIDTVGILFENPRKKKTYQRLILTPVKKISSFLAQQKKPAKFLFISANTVPFPLRKYMDAKLAAEELIHQEVAEAVIFYPSLLVGQERTGTILFSKCIYFFKKIPFLKNLFIGYDPVPVAEMAQEIVHVLEGGNSIYTHRRTR

SEQ ID NO: 6166 - protein, 398 aa, Enterococcus faecalis
GDETKKMKKKTIIILGAVAVIAVGGIVTVNALNKNAQQVAVKQAPKDDWGIDYFDVPDLQQIYINGVIQPEQMEAFARDQKITKDPEIKVKNGDVVDAGTELFTYEDEAVTKEIEAQQNSLAKLETKRANIYNKWNRAIDKFNKTKEEDRTMSGDDLNEQYQTEVDAVDEEITFTNETLADLGAKQYISTKANFKGRVSIPEVKDANSPILRLTSEDLYLAGKVNEKDLTKISVGQKAKLTSVSNNVVVDGSISYIDDNPPEGNSDAASGNPEGGTTMSSYSVKIALANLDKVKNGYHMQATIDLGDLGAIELPKKAIQKEGEQAYVLVNDFGTIIRRDVQVGQENGDKMAIESGLESADRVVISSKKPVKVGDIVESDAAIASDESATNESMTDASK

SEQ ID NO: 6167 - protein, 239 aa, Enterococcus faecalis
EGLMVEANNTNQPLIELRDINKFYPVGKEKLHVLKELNLTIHQGEFILIMGKSGSGKTTLMNIIGFLDRLTDGSYHFSGTDVSKLSENKKSAFRNEYLGFIFQQFFLINSLNVSQNVQLPCVYEGKKSRAEKKAIAEKYLKIVGLETKAKSKVTELSGGQQQRVAIARSLVNDPLLIMADEPTGALDSETGTEIMELLKELNEQGKTIVMVTHDEDMKKYASRVIHMKDGRFLEEEVIR

SEQ ID NO: 6168 - protein, 409 aa, Enterococcus faecalis
MIANLFVSTFLSLKAHKLRVFLTMVGIIIGITSVVTISALGEGMKRQVVKASSAVNADVLKIHYTMSDGSSDNFMSYEEPDYTFSRVDLKKLQDIQGIESIYPQYGESMMGGGDNLFVPMDYFGAQANLSITSTKGQNDILYGRDFQPSDANTDAIVLNHDIFEAQIRLDDPSQLIGKAVSIGGYMYKVIGILAPKDLDSLGMNDDWATAMSSFVSRESYNKLAKTKAISGINIKVREGADREAILGQAITILSENHPEVKGTFKENDQDQQLQQQMEEMVTGMTMFLMAITAISLLVGGIGVMNIMYVSVTERKREIGIRRAIGAKPRVILFQFLMEAAFITLIGGLIGVGCGYLLATVVGGYISITPIITPSIFAISTLVSVFTGIFFGIIPAIGASRMDPIKAIYN

SEQ ID NO: 6169 - protein, 241 aa, Enterococcus faecalis
GSRCNEIMIIFLLILCVLGFAYTNVFGRKVWHKFCMVIFGLGFLASLSLIVLNDKDHFGMTEVTQDKTFELKSSSSSKDGPNMLLYQPLGDGSEKVYLYNTPDKKKLQKTGTENVTNTVQKDAQKATLVQKTTKWSYQESWAKTLFGLADNDNQFAKQENTFNVASDWLVLSADQAKKLGEYMEQHAADIKKEGTETVGKKMMAAMMANPSMSQEEQAKLTEQYTKEFQQELIQKILSDMK

SEQ ID NO: 6170 - protein, 506 aa, Enterococcus faecalis
LMQFNLKLTEKGAIYVTSQQPVDIHGKPYNRSLLVGVLLIGTFCTILNQTLLTTALPTLMKEFDISASSVQWLTTGFLLVNGIMIPISAWLINKFSSKKLYITAMSTFLIGTIICFVAQDFGMLLTGRLVQAAGVGVSMPLLQTIMLSIFPPEKRGAAMGTTGIVIGLAPALGPTLSGWIIDSYTWRDLFGMVIPIVVLVLILASFLMKNVIQLSNPSIDVLSVILSTLGFGSLLYGFSSVGDKGWGSPQVYGFLIVGAIVLCLFTYRQLHLEQPFLELRVFKSKVFTVAAILSGVTNMAMIGAEMVLPLYIQNIRGESAFHSGLMLLPGALVMGLMMPVTGRIFDKIGARRLAITGMFILTAATLPFAFLTKATPIIYIIVLYAIRMFGISMVMMPVTTSGMNALPMNLLSHGTAVNNTFRQVASSIGTAVLISVLTNVTKDGLPASDLLKTAPLTYRDQATNATLNGYHAAFFVATIFGVLGLAITFFLNKKEAMPVKEVGAMK

SEQ ID NO: 6171 - protein, 506 aa, Enterococcus faecalis
RWLYYQPLNRYTNYQEAAEKTPTVPIIFDESLPAFPALGLETTYGESHQEILKRAYQLATLGVKKGDKIIIYKSPKFDTYLLAVAASYLAAVPVMVSYHLPFETIEVFVDRLEDPYILFDDVTAEKVQAVRNSSANKKLSVASLLEADATEVPQDELTKDEIAYMTHTSGTTGIPKLICHSNHSMGWRTKWQKTIFTKIAEKKLVGFHISPVHSRFNIGVSSLMAMGFPMMPLANASSEKVAEMFSTYQPIAVETHPNNFVQWVRLAKEKPEAFASVHYYHSTFDAINNATMVAFLKASAANEPIFLQVYGQSECGPMILRAHTLESLKDSDARDMGVGLEDLTQARITDEKGQVLPAMTDGHIQFLSKGRALTYYKEDARFAENVYGEWWDSGDYGMLDERGHLFLKDRQVDLIENIDSNLAIEDHLLDALDFLEEVIIVRGKENEPQPILAVVPGEEMDWDAWWTQVADLPHLNEPIIMAFDEIPHTATMKVQRLQLEKWLKEQ

SEQ ID NO: 6172 - protein, 234 aa, Enterococcus faecalis
ASMKILIKQDFDTMSEWAKMLLLSTMSQDKRVNLSITAGKTPALVYQKLASIVKNSSDFDNVHYYNFDEIPVPHQKEGITLTDLRTLYLTPAEISEQNIHPLTVENFQQQEQRIADAGGLDLMLIGLGADGHFCGNMPTTTHFKNETYQVTVTGSEPWFVPEMMQPGMTFVTMGPASIMKVKHLVLIVNGEQKAQMVKQVLQGPVTETYPASILQLHPNLTVLLDEAAASQLEK

SEQ ID NO: 6173 - protein, 367 aa, Enterococcus faecalis
MNIQSIETYQVRLPLKTPFVTSYGRLEEKAFDLFVITDEQGNQGFGELVAFEQPDYVQETLVTERFIIQQHLIPLLLTEAIEQPQEVSTIFEEVKGHWMGKAALETAIWDLYAKRQQKSLTEFFGPTRRKIPVGISLGIQEDLPQLLKQVQLAVEKGYQRVKLKIRPGYDVEPVALIRQHFPNLPLMVDANSAYTLADLPQLQRLDHYQLAMIEQPFAADDFLDHAQLQRELKTRICLDENIRSLKDCQVALALGSCRSINLKIPRVGGIHEALKIAAFCQENDLLVWLGGMFESGVGRALNLQFASQPTFSFPGDISATERYFYEDIITEPFILEQGTMTVPQGLGIGVTLSQTNLLKYSQYQKIM

SEQ ID NO: 6174 - protein, 282 aa, Enterococcus faecalis
TSRKTGDFMERLIRGMQYHYQWLTPFDAKRTTVVCLHGFTGTLATFAAVFPSQTPYNVLGIDLPGHGATASLVAPERYTMKQVCHDIAELTESLNLPCFCLLGYSMGARTALGFALHYPQKVQHLLLESGSPGLATAAERQARICQDHRLAERLLEEPLVDFIDFWQELPLFQTQKALSVAQQMAIRQERLSQSAFGLVSSLWYMGTGAQESYWERLAELQPIPTDLLVGGEDQKFIGIAKKMQARQPLLRLTIFPEAGHCIHLEQPTIFYEKVTALLEGAI

SEQ ID NO: 6175 - protein, 631 aa, Enterococcus faecalis
WRVRCGLAFRCLCWSARRSLCRLWYCCGFPSRARKRRNENKISTDVTRNWRSGLMNHQETMTDYLMAFIEGLKNSGVEQAVISPGSRSTPLALLLHRETAIQTFVDVDERSAAFFALGLSKASQKPVVLLCTSGTAAANYYPAICEANISHVPLVVLTTDRPHELRQVGAPQAMDQLQMYQNHVKLFVEMALPEATEEMLNYAYWQGAKGAAFAQQTPAAPVHLNFPLREPLLPDLERKTKSSQQTALFAGQSILSTEQVQQLADQWYQKNGVLVVGGSHTEEEATLFIQLAEALQWPLLADPLANIVTHGQNSEVVIAHSDLFLNVATLPQEPEVVVRFGSLPISKNIMLWLKRLATTETAFYFVDENGQWQEQLKKSQTVIQAKETTFVEQLLTVVKPTEATWLAQWLLLEKTVSEVLLETLNATELNETTASLAVHQTMKENGQLFVSNSMAIRYLDRFMDSRPYRMFGNRGINGIDGIVSTALGMSAIAPTQQNVLLIGDLALYHDMNGLFLAKRYQLPLTIVLLNNNGGGIFSFLSQRTLREDDFEPLFGTPLDLDFSLVAELYGASYQEVKTIAELKQILQAAAEEPQFQVIEVKGNRQENVHLYESILAEIGRRVERQGISWNG

SEQ ID NO: 6176 - protein, 490 aa, Enterococcus faecalis
TTETHLFLSFFPANSKWKDCQTSFHDRRKRGVFNQMKLPDELRQAYQKNARQFSWVFPLETEQTALAIFAAGEKAYQGERFFWQTPKKDFALVGFGYETILKGAETETHQLNNFLKKEAATRFQNMSISGTGALLFGGLPFDTEQTPTEAWGELGEGWFYLPSILFTFSGSRIYGTLNFSGSSEQEVEERWSTLVAQFDRLLATCEELPAVAETKIDKEEVAVTEWLQAVNETVAVLREDGPLKKVVLARQLAVSSPEKIRSNQVLVNLMAQQQNTYLFALEAKDTSFIGATPERLLLGTKETFATACIAGTIKTGQTPEETKTLGAQLLQDRKNTGEHQIVVERLAKELAKMTTSENSIQAPIILENRDVQHLYVPISGQRKPGISFLESVMQLHPTPALGGEPKELAVEWIRQYEPGSRGLYGAPIGWISGNDDSGEFAVALRSGVFAGQQGVLYAGCGIVADSQAELEREETKIKFQPMLRGIGGQV

SEQ ID NO: 6177 - protein, 523 aa, Enterococcus faecalis
LVMRHFFTIQWLKHKKAEMHLKKNGHQISINSLNSHKPMTWLNKQVQKRPDHPAFYFQDESWTFLEVQQEVSHWVATYQQVLAPEEKRVALFSKNSKELYFSILALWELGKELLFLNTHLTLAELTFQLKDAQVKTIIGAPETQALLEEISFVDVQPMIKKQHSLSHQEFQQPSDLESVASIMYTSGTTGQPKGVLQRFKNHLASARGTQENMGITAEDCWLCAVPLFHISGLSIVVRQLVLGCSIRLYDKFDEQQVTQDLQEGRGTVISVVATMLQQLLSVYPEAGYSASFKGMLLGGGPIAPDKLAQCEEKGIPVIQSYGMTETCSQVVALKFEDAALKIGSAGQPLKDMQIKIVDELGQEQPEKQVGEILLKGPNVVSGYLNQRQPEKWTADGWFKTGDMGYLDAQSYLYLVSRLSELIISGGENIYPTEVEQVLQAITGIKAAAVVGEPDAQWGAVPVAYVISDQEITLAQIQDQCSRKLAKYKRPKRIYFCHSFPQTASGKIAKHRFMTEEREAFLIR

SEQ ID NO: 6178 - protein, 101 aa, Enterococcus faecalis
FMGKQYSAQEALDMGRINTGVPLEQVEDVTMEWAEEMLTKSPIALRMIKASLNADTDGLAGVQQLAGDATLLYYTMAEAQEGRDAFKEKRTPDFDQFPKFP

SEQ ID NO: 6179 - protein, 64 aa, Enterococcus faecalis
DVGEYMKYYDYSRGLKAPYSMQVIKSPKGQVVWVFAQPVSLSYLLILFLGIVLTGLFWKELPLP

SEQ ID NO: 6180 - protein, 75 aa, Enterococcus faecalis
LMNTGNLSSFLSTGFITILAAGAIILILKHWKGAEWAKIGSVIVIALILQDFATNQGKNIFAVVKWVLSLVGIKM

SEQ ID NO: 6181 - protein, 331 aa, Enterococcus faecalis
EGNMNLKKIKKKEKKEKTPRVKTFSQKKANRVVLIVASVLLVMSGVGALRANVMASNVDNLYSKVDTLSEQSKKNKVDREELDYSALSFYVENFAKEYLNYNSKASDEAKKARIDRLSKYLSLDVKDVDETENLQGNVLRTFKNTSLSRIEKMEDCYLVYLNVNYELEKDKKTENVTQNMVLPIQVKDNLFSIVGRPYFVASSLPQGKTVPLKQTENSIDVDGKEKQSVEKFLKMFFTKYSVGNKQELMLLMKNPTTTAGQDSFVSIDSGDMKFFDTKQKGVTGVQVSVTFSDKTTKLTHTEDFSLWLSKTENSYFINTMKHYFTEKEGND

SEQ ID NO: 6182 - protein, 166 aa, Enterococcus faecalis
ILQKNGKELYFMNQHIMPIFREHSKFYQRYSNVPVPEMLRLHGFIVDEMPIDEADIVYMEEYKNSLLKMGIIIDEVPFKKEFVAQYVFHGGITSLMAEGQYLRKPNGDKMYNSYYFYLYKEGFQTHKGHVRERVYVEKAIKSTFLKTFESCLGLLRVGGEYEFKEN

SEQ ID NO: 6183 - protein, 189 aa, Enterococcus faecalis
FRGGKKLVEKIRELSKEEFVNQYMFDFKSLIFKSNNPEKITAKQEKLLECEKKIAVLFYETYKRMKGYPPDEKELGRIVQRNFLDRLKLFRVEYDVISEEKFCGLHVQMVKQQMPLEKYRSDDLSYILGREKKIAINYFIAHDDFPMGYEELMISRSKQAVTQGLEELRGEFMERYHKYYRKMERSCIL

SEQ ID NO: 6184 - protein, 243 aa, Enterococcus faecalis
LMKKWIEKNKYFVGAIGVILIALFSFLLFQNQQKEEVKEAINTMVSSGLEEAEKPKKHVETKSSETVQSNQVDVITGTEVQEETPIPTVISLTEGERPSVKTIQSAQVNFNEVSDSVLGSIEIDSIQLKLPILMGDSFDNMLYGACTVLSKQMMGKGNYALASHNAGYEGLLFTSLNNVSVGDLVKLNDREGHSFTYKVKEQKHVDMTDTTMLNLTRKPTLTLITCDQATKTTGRIIVIAELV

SEQ ID NO: 6185 - protein, 669 aa, Enterococcus faecalis
NYKKLIMKRGNILKKTTIIQGLATVTILAGMAMPMMVQAQESGQVPQTVKADFFQRASANSIINAPNASVVTPDDEAGSKYSFIAKFIKGVTTVETGGDGWTNDVYVNMPPQKWDGKIGLDVTKTKKGQSWIRYNNVGTADDGTPIDLKITIQDWEQYKNAQNMVSNNIVAFNNVSAIATYQGGFSWVKQTWTYLEHGTDKEKPVSGYYSWIDVDNLQGMTIDKDSYKAIDKLYVPTKDTIIKYKEEKDGGKTFYDSDDIPLDDGDNRGDFTFLYSNRSRFDFTYSEDFATREKNLGYPLPPKNNNQYSYFGYSAKKPVRTAPMIPTKTVTDSDETNVDKNTLEGLGEVYSYTITHKVPDEMKEFYYSNYEMQDELIPELERVSDVKVTDEAGKDVTNKFEAKHEGNLVRMVAKADVLKTADFYNHEYKFNFQTKIREGASLDKYLIDGKLQIPNKAKIIQNNKEVPTDETTTTVTPKDPSIAKKILEGDKEVDLTSAKVGDEVTFKLDVQVPNTKDMTSLVIQDDLEDVLEANKEVKVTLSDGTDITDQGKISVDEKTQKVSWAANEPNKLKEKQLFVYIKGKLKDADFSQYVDDKGNIMIPNVAQLVINDEPTDSNKVNVTTPQEKPKVLPNTNMDFGTSAGVATVIAISLIGVVVAVKRQKDSKEG

SEQ ID NO: 6186 - protein, 200 aa, Enterococcus faecalis
SCGREIKGGHFVVKKIWQLACLENNYDSHSSYFRDMVRYFSYTLLALLLFFLGLYFNIGWVSGFCFVGLILLPYMGFLSRDNYREFAPRVWKIRDVRELEELYPVVVDRVRDRLLFYEKKLYLKGDSLKHADSMKEGFVLSEISLENELIFNASIAKKSCIVVEEYVYENVNFKEEFQNKKNQEAPVLRYIVYTNNFLSE

SEQ ID NO: 6187 - protein, 205 aa, Enterococcus faecalis
IMSREFIERNTKVAISITEKMKKGKNDLQKTKEKIVQLDEQGELTIPYLKITFEKLSESNEELLKEISRYEYTYVVHEAEMAVKEKAIWEEFFSIKKLYDKELSEFASFKEKYKYFEPKNSEELKKQARVLLEKKGYIVDSPFEGDFERWIGVYARPKDKPTYLDPTDGEEAGLQELYSVDGFKQDFAEWFEFEVVEGKLKEDIL

SEQ ID NO: 6188 - protein, 439 aa, Enterococcus faecalis
SCHIFFGSRFKAVRGVDLKRYRKELKLKQQELASKLGIERSLISKIESGKRVISKELEQKIIDVLNLDGGYASVEAKIDFLRIRFKTLDVRTVVEKLLHMDMNWFTHEPRGFYHYTETFSYSSIRIFRNPENVNMGIMLDLSGEGCRQLEKIFEEDNKRSWTEFFRSLYDDDIFGQGVLVDTKITRIDIALDELIVKEQENFDLYVLKEKMEQGLVDTTFKNFDFSGGFAYENKKMVNKGLSLYFGSRQSPLYFNFYQKDYELARKESISVEEAREKHEIKNRYEIRLSDEKAFLFVEYFLSSGETLDWLVKEIINQSLTVYDIEDDMKVYCKAWYDVVDKLEGLKLSVQGEKPSIEKTLRWLSNYLAPSLKMIKEIDHLLGTNELMERIDLAELKEKHEEIIEMVCVDAKDLLFTTNQNSSVRSYMEQEFDLEEVYPF

SEQ ID NO: 6189 - protein, 137 aa, Enterococcus faecalis
VWKMYSFDQVILELDNAIALKTLKNWANRIEKMTDTRFERRYAKNSAGHSYSYKVFSIKDIENFQELLRLRENNVPLNEAINEVFMSDENKATHINKQEIEDLKRDMRQLLKVSQSILAENASLKERIGALERGTAE

SEQ ID NO: 6190 - protein, 115 aa, Enterococcus faecalis
RGSILRYHVGGLLSERSKKKVKFKSRVQMLNYVIGKKPDIMKTVDRRAEKEGVTDDNRLLDYKLLVISVLDAEAVYDEDRPIEEKKFSTSQEVDKYLETRFKEHMDSAWKEMFNK

SEQ ID NO: 6191 - protein, 185 aa, Enterococcus faecalis
ISWKRKVFMDSNEIIKRVRERVYREVEKKYTRDDLDTRIQDVLYYRSETYMKLVSFANGKRIKKLADPRKFEKFMDTKGVKIVAEVLDGLNNQPKMQAMEYEQKVLTKVRQWYQKKNHPELVDLEEEAFEQLVEKNIIYKKMKKRLYEEQDNQGFVYSDNFDMQLIRDSCDIEEALYLDITLGDY

SEQ ID NO: 6192 - protein, 390 aa, Enterococcus faecalis
QVKSSDGKTKEKIKFPKIYYKSAKNSIFVSFETAGNKFQEKFETIGGFLETTFHADNLNKIDEKGFVTYELATDVYNKRIWIKDMQADEGKVQLMKGLYWHFDKDPHLLLGGGTGGGKTFTILSLIYALCRVGEVEICDPKNSDLMALGKLPLFAGKVHTGKKDITQCLENTVELMETRFKTMNNSSRYKMGKNYAYYGLKPKFVFIDEFAAFKAELANDYSTDGEVDEYLTQLILKARQAGIFFIVAMQRPDGEFLKTALRDQFMFRMSVGRLSETGILMIFGDENKNKKFKYVEKIDGQKVYGRGYVAQGGGTAREFYSPQVPQDFDFIEEFIKISKELGYEDVPKEVQEEVSQKISKHIDKEALAEIDEEFQAEKNQLSELSEKYSA

SEQ ID NO: 6193 - protein, 112 aa, Enterococcus faecalis
MLKKLFRYRGRRIRYSSRNLLALYRVLFFMPILACLGYFVGYKWIYPLYLSNPPDWKIYIVPALIIVGISIGAIVLITLLIKASIINSGYFSKVEQRQVLAHMIIDNGYYTK

SEQ ID NO: 6194 - protein, 129 aa, Enterococcus faecalis
KYLKDSTEKDLRVLKGTLIYIEDIEETLNRCGRQYEVFYHDRVFFNAIGMALMQVGELGTGSNGLSVEFKEKNSDKVDWNKLKKLRNMFAHSYDSMNERFIFRMATMFIPVYKEFCIQAIAELQKRRGK

SEQ ID NO: 6195 - protein, 112 aa, Enterococcus faecalis
IRMILTLNEIKERVKPVAEKHNVPVIYIFGSYARSEAKETSDIDFAVDITGEADEEEAYWNLYGDFFEELKEAVGHDIDLVELETLFDSQDKPERKALLENILKERVKVFER

SEQ ID NO: 6196 - protein, 148 aa, Enterococcus faecalis
FEGNFKRRRCIKRRMLSEELELKRQKYRRFLNGKFSAYRCWCSFPYYHQLYLNLYEETSEYLVQFLLLDNIFFENEEAVVKLFEGFLEQLVRSYACKIHEDFERKVCIGSDNIEEAIGKLDLMIETPSEKNSEDIQQVKLLLEAVVTI

SEQ ID NO: 6197 - protein, 80 aa, Enterococcus faecalis
VSSKRVGKVNKKMGVIGMKQEKRPVRKEKELLESRRLNPLNWLVERRLKSSIVFLHKGSGNLKEISNEGGVLKEECYQKN

SEQ ID NO: 6198 - protein, 75 aa, Enterococcus faecalis
KMNRLEELIKNPKKFNLSNEAIDSLRELFVTFETNPFFPMSRYDYARRYLMQLYFAGFISSDLVQSILSEFKKSG

SEQ ID NO: 6199 - protein, 207 aa, Enterococcus faecalis
AARPNPGRVKTTEASSSKATNSSKNDTKKESSEKKSEDKSKDNSDLKATYDKINVGDIMNSSEGGSTEDEVKAILGEPASSSTTDIQGISTTTLSWTNVKGGDLLASITVSFSDGKAASKSVSGLKVAKHDKVTADQVNNIATDGSYSEEQARKDLGDPTGITSTNINGEKNDTLIWMKNLDGDLGATVTVSFSNGSAISKSSSGLK

SEQ ID NO: 6200 - protein, 234 aa, Enterococcus faecalis
FEKRRGTEMKTLLFDVDDTLLDFKLAEKKALHALFEEENVPFTSEVESTYHRINQGLWRSFEEGKITKDVLLDTRFGLLFDAFNREVDSVKMGENYREYLSQGHDLLGNSQRILEKLAPHYDLYIVTNGVAKTQYRRLEDSKLMPYFKDIFVSEEVGYQKPMKEYFDFVFERIPNFSREKTMIIGDSLHSDIQGGQQAKIQTVWLNPTSAPATPTIQPNYTIQQLDELLPILGH

SEQ ID NO: 6201 - protein, 261 aa, Enterococcus faecalis
TMRLDKLLEELQFGSRKTVKRLIKGKQVTVDGIVTLNESQNVDAQLQMIKVKGQLISHKTHVYYMLNKPKGVVSAVSDASKKTVIDLIAPQDRRPGLYPVGRLDGDTEGLLLLTDNGQLGYQLIRPNKEVAKCYEVKVNGLVSAEDCAKFKDGIVLQGGIQCKPAKITVLAATETESHVFLTIQEGKFHQVKKMFLSVGKKVTALKRQTMGPLRLDPQLPLGAYRSLTREELQLLLPYFFIEKQQTSKALPSNLKREEERK

SEQ ID NO: 6202 - protein, 203 aa, Enterococcus faecalis
VMSVQLEVKERAIRPRSLRNQLRHEGKVPAIVYGYQIESTPIYFEEKDLSKILREHGANTVIKMTVDGKNINTLMSKAQLDTFTGQMLHVEFLSVNMKETTEVEAEVQLIGESAGVKAGGTLAQNLYTVLVAATPDKLPESIEVDITNLEIGDALTIADLPEHKDYEILTDPEEQLVAIVEAQTAPEEEEGTAAETTEPELAE

SEQ ID NO: 6203 - protein, 115 aa, Enterococcus faecalis
VNKKEVIHMFERFDSDRSRYASLGVVSSLPSGLIDSIWLIIDLNLKGVIPLNDLLHFDLLNNNGKVTVHFSQENSSVEMAIDLPFSYSTAYPSRIFAFDDGHRETILLPAEMLES

SEQ ID NO: 6204 - protein, 1015 aa, Enterococcus faecalis
AFYDNFLGGERMKNRKIWVMLVGLFTALTNGFMGTTLTFAEENEASQTIEQPSYISDFPNQVGHWQDLVGTAEKKNDSAGLWIANTKQGTNLESVSINLDAREQSSGDLELTFLYEGQSNFGLVFRGDKQKTSQWQSFAYNRDGRWQLGQPGGKWLTNIPGPTLLSGQQYKLLVRYDGKKIQTFLNDQLFYENEEVHYPDGTSINDDWMGAVGIRLFGNLSKLNIISMKSGPVGSIPVIDSSAEYRELKEKWRNQLVSKEYDSTNQALVDYVQKISNEATELDQTMNKEPNRSYLWPLEPGNTPSADLTTQFTKLQKLALAYGTKGSTLYQDDKLAATIIDGLDFMVTQKGYDGKKYHGNWWDWQIGVPQKFLNILMILEDKVSPEKQQIYTNALSSYVPDPFKQLYTKPQGTFVDLAFIPNFVTSGANRTDLALTVLGLGILQKDSGKINQASSSIVDVFKLVTKGDGFYQDGSFIQHNNIPYTGSYGNVLVKGVGQILAITADSSFQMDATLVTEFVENVDRAFLPLIYKGEMLPTVNGRSISRAPAVGKTGYGSTTMYNLLIVAKFAPNNYQKKFQEAVKYWMKENPDYYLTNARDFNDLQMTMQLLTNPEITGGQLPFTGTKLYASMDRFVQRTPSYMFGLGLYSKRTASFEAGNKENKRGWHTGDGMMYVYNDDEVQFNSSYWPTVDPYRLPGTTVDTISLADEVSAFTTITSKEQWVGGVTSDNQAVVGMALNKDGTKNNGKLLPMNLQAKKSWFVLNGQIIALGAGIKGDTEASIETVVDNRLLNDAYQYQVLSNIGEIHEKNETSKKQWLLLKSDHSNANMGYYFPEETTVNVKSETRKGTYKAINEAFPSDKEYVGDYRTFTIQHGQHPTNEHYAYVVLPGIDETDLKTYAAKKTVEVLSNTEEIQAVKQEEEGYLGVNIWSETGGTIAGITSNKAISLMRKTQQHQKTYTFSDPTQTTKTLTLKIPKDYSTVISQSDGITYDDATETFTINFENAAGSSKQIIVE

SEQ ID NO: 6205 - protein, 296 aa, Enterococcus faecalis
QRCLYLNVMGQKARHKQQQEMVILKEDMTAMSKHKLTKKELNAISWRYILGSQLNWNYERMMSSGYLYGILPVLKKFYGHDEAQFQDMMRTHNQFFNTNAIFGNLIMGIDVAIEEQDGYKAKETIIALKTALMGSLAGVGDSLFHVIWGTIFGSVAGTLAQNGSVVGCVIWIIANIALLFGRAALLPLGYKQGVKLVTTLKDKLSAFTNAATVLGVTVIGALIPSVIKATVPFVYKKNGVELVIQDTLDAILPSLVPILLVLLTYWMLGQKKLNSTRVIWIILILSIVLSAFGILA

SEQ ID NO: 6206 - protein, 267 aa, Enterococcus faecalis
EEISMHLAAYQIILITIYAFIAINDSLISNTLTQPAIAGMISGMIMGDLKTGLMVGGTLQLMRLGIAAFGGASVPDYFTGAVLGTAFAVISGKGAEYGIGLAVPVSLLMLQLDVVARFCNVFLLHSVDKAIDKMQVKRIPRLVLSGSVLWGLSRAIPILLMLLAGDAVVTTITDNMPEWLMTGLKTAGGVLPVVGVGILLRYLPTKQYIPYLLLGFFLAAYLKVPMLGVSIVGMVAAMLVFKRDGAKSTTQATTGNGDFEGGYDGDE

SEQ ID NO: 6207 - protein, 312 aa, Enterococcus faecalis
GGKFVENIVLISHGSMAEGVKVSLEMIVGRQEHVHTVSLRPDSDNLQFEKELNEKMKALNGTTLIIADLLGGTPCNVATKNYLNVDGVEIIAGMTLSVVIEAVVNQQASIKELVCLAQENIVDVKAGMNQAEQEISEASKEKELSNYSQYAGKENIVNTRIDERLIHGQVAGIWSTSLSTQRIIVANDEAATDPLQKSSLRMAAPSSMRLSVLGVEAAAKNIQSGKYGKQRLFLLFKNPKDVLRFIEAQGPIKTVNVGNMSYKEGAREVTKSIQVLPEEEQIFETIASKGVTVTAQLVPNDPVVDFMKKLRG

SEQ ID NO: 6208 - protein, 240 aa, Enterococcus faecalis
NGGNRMLPKYEQIKQDLLREIKNHTFIPGDKFYSEADIKRKYAVSSITAVKALNELTSAGYLYRIQGKGTFVSKSKVSQNVKFSDIELHSLDSEKVKVLSIEEDNQAEILKELGLPANASYYRIKRVRYSEDTPFLVHITHLPKKLVKEPLSKDLTAYASVYERVRKDFSVDLFSLASVETNEIVFPEDAELLNLLQLSFREPAVKQVKHSYLADGSVAEYIISYKHWKYFKTKIEVEAE

SEQ ID NO: 6209 - protein, 596 aa, Enterococcus faecalis
RGKMMQTFEIKEDFLLNGQPIKIISGAIHYFRMTPSQWEDSLYNLKALGANTVETYIPWNIHEPEEGVYDFEGMKNIEAFVRLAEKLNLLVILRPSAYICAEWEFGGLPAWLLKEKGVRLRSTDPIFMTKVRNYFQVLLPKLAPLQITQGGPVIMMQVENEYGSYGMEKAYLRQTKQIMEELGIEVPLFTSDGAWEEVLDAGTLIEEDVFVTGNFGSHSKENAAVLKKFMTRHGKKWPLMCMEYWDGWFNRWGEPVIQREGTDLAKEVKDMLAVGSLNLYMFHGGTNFGFYNGCSARGAKDLPQVTSYDYDALLTEAGEPTEKYYAVQKAIKEVCPEVWQAQPRTKKLGNLGSFPVTASVSLFAVKDQMMTPKTTTYPLSMEEAGSGYGYLLYSFDLKNYHHENKLKVVEASDRLHIYVDGDLAATQYQETVGEELLISGQTEKDTLALDILVENLGRVNYGFKLNNPTQSKGIRGGVMQDIHFHQGYQHYPLTFSQEQLAKIDYTAGKNPLQPSFYQVTFELEQLADTYIDCRGYGKGFVVVNGHHLGRYWEIGPIHSLYCPKEFLQQGQNEVVIFETEGIEIEYLKFTNQVIID

SEQ ID NO: 6210 - protein, 391 aa, Enterococcus faecalis
GVMEMCSQENKQRLISLGENVTDEWIQTQLNECVSKIAKNMQRFGTQFPSACATNGRYRLKANDDWTNGFWTGMLWLAYEWSHQEKFRLLAMENIDSFQQRLEEHFVLDHHDIGFLYSLSAGAGYKITGDERCKQEVLAAAEVLSARFQENGSFIQAWGHYGDPKEYRLIIDSLMNLPLLFEATKLSGNRVYEEIASRHYHTLMKTVIKSDATTYHTYYFDPETGKPKHGATHQGHSDTSIWARGQSWAILGIPLNETFLHSQPFPEMYPQIVEVFLTHLPADLIPYWDFDFNDQMPSDKDSSALAIAACGLLEADKLQAFPQAKELAKGMIYQLGEYYRTQNDSENEGLLLHGVYAHAEGKGIDEPNLWGDYFYMEALMRLAKPSWQRYW

SEQ ID NO: 6211 - protein, 77 aa, Enterococcus faecalis
HINLLYYNVKENKKRPFLIISLKNKSVGQKSLWIFAPRSKTDKRREQNQHYALLRSQQLLRAKALRVEGPSEISRNC

SEQ ID NO: 6212 - protein, 276 aa, Enterococcus faecalis
KMIKIELKNKDNQIITGRIDHEKPEAPFVAEGDTLAVLAIKQYLYQVGDKIVVTYTGATPYLMVQLDETLAPSLIYLKEKVWEYQIPLEESARKAFVDTAFHSARHQIMVRQAHTFEKDNYQNLSMNTHDQKEYSGAYPHAYANVETRDDAVFFAKNAIDSKFGNLSHGSYPFASWGINQKKEAQLTIDFGRPVETDWIRLLFRADYPHDSYWEEVTLAFSDGEERVVATTNTTCFQEIKFPMKTTQTLTLKCLRKALDSSPFPALTQIEVFGRNK

SEQ ID NO: 6213 - protein, 231 aa, Enterococcus faecalis
IRTSGEHQGFIKSHSKKKEKTPFSFGGYPKQENEALEKFKATMRAGKKNNKIFFISHPHLGLSLLPKAWWRIKEGGGLKKRIRFFLGDGEYFRVKGKVHDFYLTEEQVYYKWLPFQEVEIETTIYPFGEWHVRVHEIVTSVPLKVREGGFSLPLLGKFSEKELGKEWARVDSGELCSQIVAIEGYDHAGILQPEPNTSLFFPRTSLPYLQKELPIGTHRLICLVGGVTREE

SEQ ID NO: 6214 - protein, 276 aa, Enterococcus faecalis
VVKKYKRLLLMAGLVTLVFVLSACGTAPVSESSTGIWDRYIVYYFAQAIKFLSLGGSVGIGIILFTLVIRIILLPLMHFQTKSMRKTQELQPQLKALQQKYSSKDPETQRLFREEQQRLYAENNVNPYIGCLPLLVQLPIMMALYQAISRVPELKEGTFLWLSLDKPDPYLILPILAAVFTFASTYLSSMSQLETNASLKIMNYVMPAMIFFMGISLASSLSLYWVVSNAFQTGQTLLLNNPFKIRKEREEAARQAKARERALERAKSPKKKGKKK

SEQ ID NO: 6215 - protein, 270 aa, Enterococcus faecalis
EKREEKIKEVVQMPIYEGNTIEEATQKGLQALGLTKEDVTIDVLDEGKKGFLGLGKKLAQISMEPTISEQVTEAVEETVEDIVVADEATAVEEAVEELTEAIPSLSEESTHSLENLEDEAAIIELAMYLTNISNELNAPAMVRIARENGNIIFHLETEKQGILIGKHGKVLNALQYLAQVFIHRIASNKLSIVVNVGNYREKRHEILERLAKRTAEKAKRTGRPVFLEPMPAFERKQIHHTLSKDEQIKTHSEGDEPYRYLVVEPVKKYF

SEQ ID NO: 6216 - protein, 89 aa, Enterococcus faecalis
IRIPVDCNAFQIKRRTAASSSTTSIFSVRIPVAPPTSLYKTFSFEFTTGVITDYHNIKKETETAKKSFNKETLATIQSLLRVANVSLFV

SEQ ID NO: 6217 - protein, 248 aa, Enterococcus faecalis
RDVGGATGMRTEKILVVDDDAAVRRLIWKALQSTGILIYQSESIEKTKDIVSRVTFDLFILDDNLEHDSDGYYLVQMIREKYPLVPIIFFSSKKEEEDIIAALEMGVDSYITKPFSLNVFKAQVIASLNRARMIRKQLNVYKKEELQVGDFRFDYGRYQLFKKDLPISLSSKEVQLIQFFLENPEQVFSKEQIYSSVWGTGDVDANTIMVFINRLRSKLEENPKEPCYLRTVWGIGYTFTPDGCVQKK

SEQ ID NO: 6218 - protein, 251 aa, Enterococcus faecalis
NRRSTFSPRFSFHFVFSCVIFSFLILYLLSIKITYREVPHMNPTVEAVKRNLDLTSSKPLKICTYEAFKKTIILGDIPAGERINEKEFSEQLNISRTPIRFALQELVKEQLVEHIPMVGIVVKGISMKDAYEIYDIRKSLDTLATIKAMELMTPEDFDELEALLLEGEQYNKNNQVDDLLQNFSDFNSFIYTKSQMLRLKKIVTDLHAYLIYFRDIAIRASERRSIALEEHWLIFRGMKTKNIDQYHTFNP

SEQ ID NO: 6219 - protein, 478 aa, Enterococcus faecalis
RLQKSSKKERKKNMLLTILAYGMIIIFMYVIMKKKLSPFTSLVIIPLIFTLIAIATGVASPPPGADGVVPEVNIGNFVLDGISTTSKTGIMLLFAILYFSIMLDAGLFDPITKKMIYFAKGDPMKVLMATAVVAAAVSLNGDGTTTTLICCSAFIPIYKKLNMKLMNLGVLVILQNTIMNLLPWGGPTARAMAVLEVDADILSYLAPGMILSVLYVIFFVAYRMGKKERARLGVTTLTDKELEEMTIVNDPELLEIRRPKNFAFNGILTIVLIGWLVLSSFVGQLGLPSWIEMPPLLLFLVGTCIALMINYPKLKDQSSRISANAGDAVQVVILVFAAGVFMGLFQGSGMANALANSFVNIIPKQLAGAWGLVIAFISAPGTFFISNDGFYFGVLPVLAEAGRSYGFDNMSMALASLMGQAFHLLSPLVAFIYLLLRLTGLDMGQWQKESAKYALGIFVIFVVTIVALGHMPLFIPQN

SEQ ID NO: 6220 - protein, 146 aa, Enterococcus faecalis
ASVFTRFFNGFFYNERIPRISERRDNMGLFKSLFKKEQHTQDTEINESVIQREADNLEKRWIDIPAYIPAEPKEYQLVSIVATAIAAGEFPESRFVIKKIAKRNPEAKEVAIIAASIAAELSEESQLVVKRISKQNLEEDHYVTQI

SEQ ID NO: 6221 - protein, 147 aa, Enterococcus faecalis
LSKEFQNKTLRRIIMLRKFKISIDGKEYLVEMEEIGGVPQPAPVAPQPTAPVATTETPAPAVEETPASAAQPAAPAGADAMPAPMPGTVLKVLVNVGDTVSENQPLLILEAMKMENEIVAGKAGTVTGIHVTQGQIVNPGEPLITIN

SEQ ID NO: 6222 - protein, 377 aa, Enterococcus faecalis
EEEVICVETLIQGVIGMGQEPGRIVMMLIGGLLMYLGIKKEYEPTLLVPMGLGTILVNFPNSGVLSAGGEPGPFNVLFDFGIKTELFPLLLFIGIGAMIDFGPLLQNPFMLMFGAAAQFGIFFTVIMAVLLGFDLNDAASIGIIGAADGPTSIFVANTLHSKYMGAIMVAAYSYMALVPIIQPVAIKAVTTKAERRIRMTYRAGEVSQTAKILFPVVITIVAGLIAPVSLPLVGFLMFGNLLRECGVLDRLSITAQNELVNIISILLGLSISVSMNYAEFLKVDTLMVIGLGLVAFIMDSVGGVLFAKFLNLFRKEKINPMIGAAGISAFPMSSRVIQKMATDEDPQNFILMHAAGANVSGQIASVIAGGLLLAFLT

SEQ ID NO: 6223 - protein, 343 aa, Enterococcus faecalis
KIKEVIAVSSVYTMKRIWLQKDKKAYQAWRELMEKAELQTTEALDYTVGIYDDTALIASGSLSGKTIKCVAVCKKYQSENLLTQLVVHLLEKLREENQLHSFLYTKPKNEQIFQSLGFQKVVANQEVLFMEQGKPDFADYLGYLTQHKKAGPASSIVMNANPFTKGHQYLVEKAAQESPHVYVFVLSEDKSLFSKEARFAMVQKGVAHLPNVTVLSTEDYLVSSATFPTYFLKEKAPLEVAAIQATLDATLFKERIAPILEIQQRYVGEEPYSEVTAVYNQAMQQVFGQTITLTIVPRLASDGELISATKVRKAMAEGDKETLKKFLPATSYQYLVEHKKLMR

SEQ ID NO: 6224 - protein, 131 aa, Enterococcus faecalis
RRQRDTQEVFTSNKLSILSRTQETNEVKKVKIIKNATAGTVESSDIMITVQPIESTENTIELESSVEKQFGNQIRQVITTTLEHLDVQGVAVKAIDKGALDCTIKARMITVLHRGAEKETYDWKELDSWNV

SEQ ID NO: 6225 - protein, 301 aa, Enterococcus faecalis
LEGVGLMERLRRTMMFVPGANAAMLRDAPLYGADSIMFDLEDAVSLKEKDSARVLVHSALKTFDYGNIEIVVRINALDAGGAEDIEAMVLAGVDVIRLPKTETAQDIIDVEAVITEVEQQNDIPVGTTKMMAAIESAEGVLNAPAIAKSSTRLIGIALGAEDYVTNMKTRRHPDGQELFFARSMILHAARAAGIAAIDTVYSDVDNTEGFEAEVRLIKQLGFDGKSVINPRQIPLVNTIYAPTEKEIQNAKEVIWGIREAEAKGSGVISVNGKMVDKPIVERAERVIALALAAKLITEEEI

SEQ ID NO: 6226 - protein, 519 aa, Enterococcus faecalis
INYRGGNIDMVVNKVGKDIPQSYAEQYGIYEGELAHIGAYQEASRAIKPVKPRETKLLGSIREAIEKTGLKDGMTISFHHHFREGDYVMNLVLAEIAAMGLKNISIAPSSIANVHEPLIEHIKNGVVTNITSSGLRDKVGAAISAGIMENPVVIRSHGGRARAVAAGDIHIDVAFLGAPSSDAYGNANGTKGKATCGSLGYAMVDAKYADQVVIITDTLVPYPNTPISIPQTDVDYVVEIDAIGDPDGIAKGATRFTKNPKELLIAEYAAKIITHSPYYKESFSFQTGTGGSSLAVTRFMREQMLKDGIKASFALGGITNAMVELLEEGLVEKIIDVQDFDHPSAISLGENANHYEIDANMYASPLSKGAVINQLDTAILSALEVDTDFNVNVITGSDGVIRGASGGHSDTSMACKMSLVIAPLVRGRIPTIVEQVNTVVTPGTSVDVVVTEVGIAINPKRTDLIDCFKTLDVPQFTLEELKDKAYNIVGTPEPIKYGDKVVALIEYRDGSLIDVVRNV

SEQ ID NO: 6227 - protein, 183 aa, Enterococcus faecalis
LMWYAMFNGEKVTLLEMLDAREQRAATQKELLETAPEASLLSATMNIPGEVKNSPTLTAVFLEVIDEVEQQLLDQVPIVNFYRNEKTGPEYYLAVSLAPQELKQRMVKIEETHPYGRLVDLDVLWGNEELKSLHRGDLGLPPRRCFICQEVAKVCGRNRRHSLEAMQEKITEIILTRKEQPSE

SEQ ID NO: 6228 - protein, 471 aa, Enterococcus faecalis
HERSSQVSKKIRFTETVLRDGQQSLIATRMPTSDMLPIIKTMDEAGFHALEMWGGATFDSCVRYLNEDPWERLRQIRKEVKNTKLQMLLRGQNLLGYRHYADDVVRAFVEKSVENGIDIIRIFDALNDVRNLQTAIQTTKEAGGHCQAAISYTTSEIHTIDYFVKLAKELSQTGADSICIKDMAGVLTPQTGFELVSKMKDAIDLPLEVHTHATSGISEMTYLKVAEAGADIIDTAISSFAGGTSQPATESVAIALEDLGFETGLNMEKVTEIADYFNPIRDRFRSEGILNPRVKDTEPKTLIYQVPGGMLSNLLSQLTEQGLQDKYEEVLAEVPKVRADLGYPPLVTPLSQMVGTQALMNVISGERYSLIPNEIKDYVRGEYGKSPAPIAEEIKQKIIGDEEVITCRPADLLKPELHSLEKEIQQYAKSEEDVLLYAMFPQQGKDFLGRREDPFYDVPLQKVTVKLDLPE

SEQ ID NO: 6229 - protein, 400 aa, Enterococcus faecalis
RLFKPLLHQIEKRQPVKGSDNVLEEVLAIHQKNIGVLSLEATEAVLNHHDLAKMYTPGVAELSLMIAQNHELAREWTISGKLIAVITDGSAVLGLGNMGTQAGLPIVEGKALLYKNLAGVDAIPLALEQKSVDEMVQTIENLQNSFAGIHLEDISAPKCFEIEEKLQQRLNIPVYHDDQEGTAIVVLAGLINAAKIKGKPLNELRVVINGVGASGVATAKLCIQAGITHLTLVDRQGVLREEDPTLNPYQRALLRQVIKPSVENKDLATAVVNQDVFLGLSEADVLTPALIKSMNQDPIIFALANPKPEIEPALAQANGVRLLATGSSKYPNQVNNILVFPGLFKGLLAAKGRKVDVGLQMTVARSLAAMISEPTVHKFIPNVFDGGVFDTGFNAVLDYI

SEQ ID NO: 6230 - protein, 190 aa, Enterococcus faecalis
WLMAVFLWRRQIMTKKNSMMYLAISNLFLVFLGVGLVIPVIPQLKEEMHFSGTTMGMMISIFAIAQLITSPIAGVLSDKIGRKKMIATGMLVFSISELLFGLAQAKSGFYISRGLGGIAAALLMPSVTAFVADMTTISERPKAMGLVSAAISGGFIIGPGVGGFIAYLGIRAPFFAAAFLAFVRFILTCQ

SEQ ID NO: 6231 - protein, 151 aa, Enterococcus faecalis
RRVLPLIRKMKPTDAAALTIINKEQLGYEVPVDVTCKQIEKLLLASDREFLYVYEETKTGKILGYVHAQLYETIYSQTLLNVLGLAVAKEAEGRGIGKQLMTKLETEAKKCNLSAIRLNSGEQRTAAHQFYEHIGYVSDKKQKRFIKYLDT

SEQ ID NO: 6232 - protein, 262 aa, Enterococcus faecalis
QLSINNGGIIVVHQLLAQMENGYMKIIKENLVGIYLHGSYAFGTYCHSVSDLDVLIVVYEKLTIDEKKQLLDYTINILDKWAPKKGIEFHVLQLKDTINLSYPIPFDLHFSPIHRSRYLTNKNKYIEDMMGYDEDLVAHLMITKLYGKVLVGKPIDSVFGWIDQKKYFRSIVADVKEAKKEIVQQPMYVILNMCRVMAFKQENKILSKRAGGEWGLVHFPTNHHSLIQLALKEYRGETVLLEQYNDSELNDFADIMLSLLFK

SEQ ID NO: 6233 - protein, 178 aa, Enterococcus faecalis
NENAFREEMLMSELVVIREMQEKDILALDTQFVQQGWPSRQEILMNYLEEQLVKQRTVFVAEKKATLLGYVTLLPLAKEGPFKNLYPEIADFNVFLPFQKQGVGRLLLNRAENVAKSYADTVSLGVGLHPGYGAAQRLYIKQGYVPDGSGVWFQNKQLKPNERCVNDDELVLYLSKKL

SEQ ID NO: 6234 - protein, 110 aa, Enterococcus faecalis
VLRFLEKWMLWYDKKEGVVSMDYQERLKNLPPEVMTAFSESFIFLISNDKVQHFPARDLTQAEMIQRVKEKLGEAVTWSLWQGFVIAVNSEETCVAVLPKYYQLDGFENE

SEQ ID NO: 6235 - protein, 191 aa, Enterococcus faecalis
QQNLESFFQVFCSFVLVFNNQENGGKQMQPKLIILRGNSGSGKTTIANALHQCLKEQSLLISQDVVRREMLRVKDETGNLSIALLKQLVAFGYQECQYVIVEGIFQKAIYHSFFQEIIHLFEGNVQVYYFDISFEETLKRHSQRNKNQEFGVVEMKRWWLPEDYLGFPGEQRLSEQLSEKQIIRQILADIQ

SEQ ID NO: 6236 - protein, 336 aa, Enterococcus faecalis
FEVRNIVTIKDIAEQVGVSSATVSRVLNYDETLSVSDETKKKIFETAETLNYKKRARKKQAGKKKIRFVQWFSDPEELDDIYYLSIRLGVEKRAEELGFLLVKESLTNLSQKRFDGTIALGKFDEKQVAALAALGAPLLFVDFDAMAFGQNSIVVDFAGSVKTIVQEFLAQGHQKIGMLSGQEYTKESHVALVDPRFVAFKETLKDLDLYHQEWVVEAAFSVEEGYQAMKDFIEEADTRPTAFFAASDTLAIGVMRALQEAAIRVPEDISIIGFNDISVAKYVSPTLTTVKVHTEWMGELAVETMKELCLNPPPVPRKIIVGTEFIQRDSTKHSSK

SEQ ID NO: 6237 - protein, 502 aa, Enterococcus faecalis
IGEHQMMKESSKWIAAFVEIIIENGDWTETDRYYLTNRIAKLVGCDFFEQPEAVACEQEPLRVVEHLLNIAQANHQIDDSITEAEQLEAELMDFITPTPTIINQKFMDYYQESPRKATDYFYQLCKTNNYIKTKAIAKNIIFPMDSPYGKLEITINLSKPEKDARKILAEKKMSQKKYPACMLCMENEGYYGRVNYPARTNHRIIRLNLEDEAWGFQYSPYAYYNEHAIFLDQQHREMKIEKKTFQRLLKITELFPEYFVGSNADLPIVGGSILSHDHYQAGRHTFPMDLAPMEKRFSLKKYPEITAGILKWPMSVIRLQSDRQEELVEAAELILTKWRNYSDERVSVRAYSKDGTPHHTITPIARRKGSLFELDLVLRDNNVSEEFPDGIFHPHPEVQHIKQENIGLIEVMGLAILPPRLAQELREVEKYLLKQPNQIAESHRAWADELSQQTITEANVKEVIQQGIGTIFVQILTDAGVFKRDEEGRRAFERFIQCIEND

SEQ ID NO: 6238 - protein, 329 aa, Enterococcus faecalis
MSILVLGGAGYIGSHAVDQLISKGYAVVVVDNLLTGHRSAVHEQATFYEGDIRDKAFLRSVFEKESIEGVLHFAANSLVGESVEKPLMYFNNNVHGTQIALEVMQEFGVKHIVFSSTAATYGEPKAMPITEETPTNPKNPYGESKLMMEKIMKWCDNAYEMKYVALRYFNVAGAKKDASIGEDHTPETHIVPIILQVALGQRAELSIFGDDYDTPDGTCIRDYVYIEDLIAAHILALEYLKNGGESDVFNLGSNNGYSVKEMLDAAREVTGQEIPATIAPRRAGDPSTLIASSEKAKRVLGWQPEVTEVKDIIATAWQWHVKHPQGYNE

SEQ ID NO: 6239 - protein, 392 aa, Enterococcus faecalis
KERLVMEELLMNRFVEIFGEKGTACYFAPGRINLIGEHTDYNGGHVFPAAITLGTFGVARKRDDQKIRMFSDNFKEVGLIEFSLEDLTYSDSDDWANYPKGVLNYLIESGHNIDSGLDVLFYGTIPNGAGLSSSASIELLMGTICNDLYALHCPMLELVQIGKKVENEFIGVNSGIMDQFAVGMGEKDQAILLDTNNMHYEMVPAKLGEYTIVIMNTNKRRELADSKYNERRAECEEAVRLLQKELSIEFLGELDSETFEQYQALIGDPALIKRARHAVTENERTLLAKQALTEGDLEEFGLLLNASHRSLKEDYEVTGIELDTLVACAQEQPGVLGARMTGAGFGGCSIALVPKQNIDAFIEAVGQSYQDKIGYAADFYPASIDDGARKLF

SEQ ID NO: 6240 - protein, 64 aa, Enterococcus faecalis
SKRNAKKINLYLIVLYTFSIEMTIKKILSKHLQKFSKYCTICLLVKGAISDGRTVNESICRNIW

SEQ ID NO: 6241 - protein, 362 aa, Enterococcus faecalis
TTKLNLLNIYLKEGLIILTISTESFGQGMLLYTLTNKNGVTLKATDFGARIVALDVPLTKNESRSLVLGFPSADEYLSKDLYFGATIGRTAGRIADGSFELAGKKYQTMINTPTQTTLHGGTPGFESKKWHSEIQEAQANPSVKFWLESPAGENGFPGNLTVSVTYTLTEENEWQIEYQATTDEQTLFNPTNHVYFNLTGNPTIPIDAHELQINAQKFVPLDERVLPLGELASVDQTAFDLQKPKKLAEVFSSNDEQIQKMNGFDHPFILTNHDLINPDVILKSPTKDITLEMFTDQPSVVIFSANFADNGPDIQGQKLVNHGALTFETQVCPGAERFPLFGSITLSPEQEFHSTTRFKLIY

SEQ ID NO: 6242 - protein, 72 aa, Enterococcus faecalis
EHFYYLTFLIAPFTLFSIRKAVMSMYAIKFFHGYLTADGKRTRDKSGCLVYHSEKEAQKLADKIGGRVKKIG

SEQ ID NO: 6243 - protein, 216 aa, Enterococcus faecalis
RSAYMKQNDFDYMQMLKGELYYAPTILPENKSTKGKVLAQKINQLPIDNVKEIVALEKELLGKTGNELYITPPLHVDYGRHIEVGENFYANMDCIFLDVNKIIFGDNVMVGPRASFYTAGHPIDPTIRTAELEFGTPIIVEDNVWIGGSATILPGVTIGKNAIVAAGAVVTKDVPANTIVGGNPAKVIRKIDENDQQFWTEKQRQYQIAKKQFFNE

SEQ ID NO: 6244 - protein, 128 aa, Enterococcus faecalis
KKVSHLLELYINFKGEAKEAIAFYEDVFDTKCQNLMTFGEAPEDPEHPINDEIKDLVMNASIIIEGTYVMISDVPDMFGFEVTEGNNLSLVVSTDDDEKIDRLFKRLSEGGTVTMPFLKLFGPKSMVP

SEQ ID NO: 6245 - protein, 177 aa, Enterococcus faecalis
HFCVSSFIIRQNEGDEPSMTEQTRENKKAAYELCLQQLSGLLEIETDAIANLANSSALLAQTLPDTVFAGYYLYKDEELVLGPFQGKVSCTRIKMGKGVCGESAEKQATLIVDNVKTHANYISCDSAAMSEIVVPMVKNHQLVGVLDIDSGVTNSYDAVDQLYLEKFVTLLLEKSDF

SEQ ID NO: 6246 - protein, 184 aa, Enterococcus faecalis
IDIHLHDNGEVGVYTIDKFLDILEERKFTQRTAISHAFALLDVRPAEKEKLYQRLATHQTAIMSTIPYDPRYLLPPIDVLRQAGVSVHLGSDGFFDSWSSNVSGDLFEKLRNFCEMTGKITEEQLTQAYVHGCGKVAPFSFEEERLWFTEGDEANFIFTEAASTAEVIARKPQKRQIMLKGQWV

SEQ ID NO: 6247 - protein, 228 aa, Enterococcus faecalis
SRSKGGKRMTASIVYLNNVRLETGFAKDHHELTYTKTARYTLAIQEGKIQAIIPQNQVTEKQQGTDLNGQLAIPAFQESHNHLDKTYLSLGWRASQPVKNLKERLADEASELKLLAPSTEQRATAMIEKLIGYGASYIRTHVNIDPYVELENFWGVKRALEKYAHVIDYDIVVFPQHGLLKNPQTVLLMREALKNGGTMVGGLDPAGIDYAIEESLETIFDLAEEFQV

SEQ ID NO: 6248 - protein, 416 aa, Enterococcus faecalis
  MISC_FEATURE (84)..(117): Amino acids 84, 103 & 117 are Xaa wherein Xaa = any amino acid.
LNEGRKGFVMLLENCKLETGFSTVNQRIVATETASYDIRIENEVCTAVAPQLRPLENETVIDVNQQLVLPALREMHIHIDKTYXGGPWKPCRPLTKGILTRIXEETWLLPEQLPTSXERACQVIEQYIQQGHYHIRSHCNVDPSIGTKHIEITKEAFSRYEQYITHEIVAFPQHGLLRSQVEPLMREALRMGATHVGGVDPALVDRHVDHSIAKIFELATTFNKKIDVHLHARDTLGLYEFNKFVDYTEQAKMFGKVTLSHALALGSLEEAAIRDIAQKFIETGIDLTSTVPIGMPTMPIPTLVEQGVKISVAHDSLTDHWSPFGSGNTIEKLNTAAQRFKISDEYRLNRLWGLASNFVTPLDPNGQQVWPNVGDSADFLLFNAESTAHVIARQQPIQQLILKGQLVEAVQKGEKE

SEQ ID NO: 6249 - protein, 558 aa, Enterococcus faecalis
NGGIGMKKLKMLGCVGLLLALTACQAGTGNSADSNKAAEQKIAISSEAAISTMEPHTAGDTTSTLVMNQVYEGLYVLGKEDELELGVAAEEPAISEDETVYTFKIREDAKWSNDDPVTANDFVYAWQQVASPKSGSIHQALFFDVIKNAKEIALEGADVNTLGVKALDDKTLEITLERPTPYLKSLLSFPVLFPQNEKYIKEQGDKYATDAEHLIYNGPFKLKEWDNASSDDWTYEKNDTYWDAEKVKLTEAKVSVIKSPTTAVNLFDSNELDVVNKLSGEFIPGYVDNPAFLSIPQFVTYFLKMNSVRDGKENPALANNNIRKALAQAFDKESFVKEVLQDQSTATDQVIPPGQTIAPDGTDFTKLAAKKNNYLTYDTAKAKEFWEKGKKEIGLDKIKLEFLTDDTDSAKKAAEFFQFQLEENLDGLEVNVTQVPFTIRVDRDQTRDYDLELSGWGTDYRDPLTVMRIFTSDSTLGGVTFKSDTYDQLIQETRTTHAADQEARLNDFAQAQDILVNQETVLAPIYNRSISVLANQKIKDLYWHSFGPTYSLKWAYVN

SEQ ID NO: 6250 - protein, 364 aa, Enterococcus faecalis
FIQKEALLMMTVNDLLHAEELPGLTLLTHETNLDAPILQANILENPDAFDWLTPGEILLTTGYIFKDQPCLQKRLIQELANMNCAALGFKVQRYFNEVPQEMIQLANDVGLPILSIPYNYNFSQIISLVNRRVNQPDETISQHSVHMHNKFYTIIKAGGKSTQLLEVLSAAIQAPVMLLDERFQIMNHFDLPDAPTRITSILNNATLKKQFETALKAQNNELLLFYKEPLTVEFSLANHQLSLRILPIKKKNLSLSYLVIWQTTKKLQTIDLLSVEVCAHYLLPQLQLESSENLTTMLKIGALFQDLIQEKNTNPQAWGEFSNYLQLNEKDTFSLLLVAIEQLEQLFNPTISMNNIGHQLNHIL

SEQ ID NO: 6251 - protein, 180 aa, Enterococcus faecalis
ENPAQEEATYLAQTTHLAKNLLEQLMKLNPKLSFKLAIGPTVKKITNLCDSYKLAQETFHLAQASQELQQRTILNYDDLFFYRLMIETLTKQAKQKIYQRLIEPLEKEDQKHESSLLETINTYFQSNKNISLTATNMYVHRNTIIYRLKKIEEILHLTLEFPDSSLQLSLAVYLYKQKLL

SEQ ID NO: 6252 - protein, 73 aa, Enterococcus faecalis
PSSLYGSICTNFCNDYSLTKLKQLKKPPRFTIRGGLFIVIFVYINKQPNLVVANYQEILKLSEESLLFFLSGK

SEQ ID NO: 6253 - protein, 142 aa, Enterococcus faecalis
IMKFSKIMVGVEESPDALKAFHYAIQKAKEEQAELVIVSILEEKEINVYQSLDKNYWQEQLAKLEKQTEKYQQEALANGIDKVSVIVNEGNPGELIINKLIPLNKPDLLIIGSKSTSKLKSFFGSQAAYMARYAPISVMIIR

SEQ ID NO: 6254 - protein, 293 aa, Enterococcus faecalis
  MISC_FEATURE (5)..(22): Amino acids 5, 8, 12-15 & 22 are Xaa wherein Xaa = any amino acid. 1
HSPYXRAXVPIXXXXGSRAPTXPPFPFSSFPFLSLFSSSPLLTMATCVNSLLLIMGVAVFKSGSVKDPSFFGLFDALSNPAVMSNSILAHIAGSGILSILFAVALLASGQNSTITGTLTGQIIMEGFIHMRVPIWLRRMVTRLLSVIPVLICVLMTSGKSTVEEHIAINNLMNNSQVFLAFALPFSMLPLLMFTDSRVEMGEHFKNSWLIKLLGWGFCHWLNLPPYERFTDQIERFFGDNPTASQITLADNIAYVIIALVILLLVWTVVELYKGDKRYAQQLAAMEQQVEEVK

SEQ ID NO: 6255 - protein, 88 aa, Enterococcus faecalis
TIEGTIVGGFKLKISDVTVYKVKPRWIFVKISTDEGIEGWGEMISGTKTETVVAGAYEIGNRLIGRNPFEIERLFQRNASIFLPKRSY

SEQ ID NO: 6256 - protein, 190 aa, Enterococcus faecalis
LHYLWKDRCQFQMLHKNGHKKNQKVHVYLSDWMLQLVLVNPDVITTELIIIALTIALALVLPGNRVLPFADLAVVPFRVAMVVALTRGNLLKNIIIGLVVTASLLWCGSATAPMLTAIAKSVGINLGTSSMLISSFAATSMIQSYLVFIAFAYKPIIGIPVLLLAFAGAWYYFDGIKKVNHEMDEPLKAQ

SEQ ID NO: 6257 - protein, 61 aa, Enterococcus faecalis
LTPTAASNPINKRVPFDFFCDHFCAASEIGIYPSIDNEVILGIKTKTADMLTPNCQTALIS

SEQ ID NO: 6258 - protein, 255 aa, Enterococcus faecalis
LIKGAEKMKIIMNVFNFFIDAGPTVMLPVIITIIGLIFGLKISRAFKSGLTLGIGFAGIKLILDFMTTNVGPAAKAMVDRTGVKLDALDVGWGSIAAVTWASPIIPILIFAILLVNIVLLILKRTHTLDVDIWNYHHMAIVGVMVYFVTKNVSLGVGASVVMAIATFKISDWSQPMVESFFGIPGVSLPTVSALSSLVIAWPLNWLLDRIPLFRKSKFTIKDAQKYLGFFGDSMIMGLVIGMVIGVLAGYDIKAV

SEQ ID NO: 6259 - protein, 98 aa, Enterococcus faecalis
YKEEIIMKRILVACGNGIATSTVVATKVREYLQQHGIDVSTTQTKLMEVPGKVQDYDLLVTTGQFDGQTGGVPVIKGMPILTGIGADQTMEEILNLLK

SEQ ID NO: 6260 - protein, 157 aa, Enterococcus faecalis
IGVRPLELYLNEELVFRNVQAKTDSEVLAFLASEMYKKNYVKEEYIQAIQEREKEYPTGLPSTPPGIAIPHANYEMVNKTTLAIATLKDPVLFHNMENNNEQLPIQIVIMMAIGEPHGQVEMLQKIVGIIQDEPLRQEMIRAGNDTELLELLKKAVF

SEQ ID NO: 6261 - protein, 214 aa, Enterococcus faecalis
DKDLKEENMRLADYPKLTVIMRGYTFDQADAILQAMQEFDHQFAVEMTMNTKGALENIHELNQRYGDTTYIGAGTVRTLEQAQACYEAGAKFLLGPHMFTKEMLSYANKKGLLAVPAAMTPSEVDRMFKEGADIVKVFPAAVVTPRFFKDIQAPLGKLPLMGVGGISKENAKEFFEQGASYLGLGSGMFNKQDIEELNVKNLARSMKELIEVIK

SEQ ID NO: 6262 - protein, 700 aa, Enterococcus faecalis
KLSGNVCEQVYNDFVRRIVKMNKRIREILKLIIKNPEMKLSTLTSELDLTRRQINYAINQFNEELKTKNIPLIQRSHSGNITVPIEVIQMISQPDYDIGDDQELVVLTDSERQALIVMTLIANIDYISLDHLVDAVDVSKTTVMEDIKRTEPFIRNYSLTIRYNRMNGYQLVGSEHRILQLLSDLVKRYPIFRREMIRRKLAQDVSEEEIVHLIHNMEQMLHLSYSDESVDYLQTSARFLVSRGIKMSDKHAFFPDDVTDTPEFRMLMILVHETGWSLSKSYMEWFTLLFLTSNIFESKTTQNYDSDQELRKLISQMVENFQNQTLILIDDREDFERRILSHLRPACFRIRYNLSLGVYSIDSLIKDSNHAILIDLMKELIIPIENWLNKAFPNDELDLLSYYFGYQLSNHNKLNKQRQRAVVVCTNGVMVSKLVRANMEKLFPEIHFLASLSVRDFYKFEADYDLVFTTTPLKSSMLQFMIEPIMTYQQQISLRYRVLSDLGITKVDRAMDELLTIIRKYANITNPVSLREELQYFLIKEDGSTPLDNFKVLPSLTYYLRPSYVQIVEEEMSWERAVEVACRPLLEHQIIDSRFIADCLDQIRQPGYAGYLGMKTCIPHTTVDKGVISDGVSILVCKKPIRFPNGEDVSLILPLSFFDLTKHLRAINQIADIAKDDSLIEQLLIADDEKTVYQLLRQRS

SEQ ID NO: 6263 - protein, 414 aa, Enterococcus faecalis
KGDLNELFRVHLEKAVNTLLKTELTAFLDYEKYDRIGFNTGNSRNGSYDRTVKTEYGELHLQIPRDRNGEFKQQTVPAYRRTNDTLEETVIHLFRKGITMSEIADLIEKMYGHHYTPQTMSNMTKSFTEEVTSFKERELHDRYAAIYMDATYIPLKRKTVAKEAIHIAVGIRPDGSKEVLSYAIAPTESITIWEEILIDLQERGVKNVLLFITDGLKGMAGAVQRFYPKARFQHCCVHVSRNISHKVRVDDRKEVCDDFKMVYQASSKKAALEARGAFAEKWKTSYPKMVESILSNDYLLTFYDFPLAIRKTIYSTNLIESFNKQIKKYSHRKEQFQNEESMERFLVSSFDTYNQKFLGRSHKGFQQAEGELEQMLSQPMENWKQSTVGKNHLHKIIDAPKSIVFSSLILFFFN

SEQ ID NO: 6264 - protein, 195 aa, Enterococcus faecalis
NMSTTIEVNKQSVKQFLETGKIKKFVIPEYQRPYAWTDEQIQVLFDDLAEYTANNNESTYFLGSIVAYENDHNEQEIIDGQQRITTLFLFLRAIYAKLENSCEKEALFLKSQIEPALWEQDDLTGEVKPDKILIMSRVMWDEGNEEFASILVSGEADVKSKSNYSKNYILIQHLLNEYATNEPLSFYRFISKKAI

SEQ ID NO: 6265 - protein, 1014 aa, Enterococcus faecalis
EVIHLVENKEIRFEQDIETSLTTYGKWKKETFNESNFDPIIGLDCQKLLGFVQKTQPKQWVRHQRNYNNDGEVKFLQRFNQEVETHGMLHVLRNGIKDRGVRFKVAYFKPASELNDERMEKYEANSFTCTRQFAYSPNNHKTIDMVLSLNGIPLVALELKNQYTGQTVENAKLQFQKDHDPKELVFRFNRRFLVYFAVDHTDVYMTTKLDGKKTYFLPFNQGSNGPGRVGGAGNPSNKDGYPTAYLWEKVLTRDNLMDIIQRFMNLEIKKEKQGDREVTKKTLIFPRYHQLDVVRKLVADVKSHGSGENYLIQHSAGSGKSNSIAWLAYHLASIHDQLNYPIFSSIIIVTDRTVLDRQLQNTIMNFDHQTGLVETIDDRKSSQDLKEAINDGRKIIITTLQKFPVIYQEVDQVEGRNFAVIVDEAHSSQTGNSAQKLKAALSDKSKSLEEYYELEGEVDDVLPDAEDELVQQLAAQGKHQNLSFFAFTATPKEKTLEMFGTKQPDGHFEPFHVYSMRQAIEEGFILDVLKNYMTYSTSYKIAREIEDNPELPKSEATRAIVRFQSLHPWAVAQKTAVMVEQFRAVTRTAIGGQAKAMVVTASRLHAVRYMKEFKKYIANKGYNDLNVLVAFSGLVVHGETEYTETKMNVTKSGENVRENQLKEAFHTDNFNILIVAEKYQTGFDEPLLHTMFVDKKLKGVKAVQTLSRLNRTMPGKKDTFILDFVNDVEDIEAAFQPFYEQTNLREEINVNLIYDTQSKLRKFNVYNQGDIERVMKLVKQAQKQQNERLLGRISSMFKPIMDRYEEMNKDNQYQFRVTLRNFSKWYDYISQLDRLFDMELLEERIFTGYLLKFLPKETRENIDISDKVKLEYYKLRQDFSGEIHLVNKEGELVNPKTIDAGIKPPDERDSLEEIIHKINERFPNDFDEGDRVLVEILYRSFADNPDLKVVSMAKNNDAQMFEKSLFPDVFKDKVMEQYEKNNAAFEKMFGHDDRYFDLVYTLVARDLYKLLRTK

SEQ ID NO: 6266 - protein, 194 aa, Enterococcus faecalis
MTYKHLTIDELTMIESYYLQHNKPVEIANRMGRAIQTIYNVVNKFKQGKTALDYWHQYKENKKKCDRKVIQLPAHEVDYIKEKVTLGWTPDVIIGRKERPVSCGMRTLYRLFSKGIFDIDTLPMKGKRKPNGHQEKRGKQQYQRSIHDRPDNYPDFNSQILGPPGGGVKIFLAPPQKFPPPSFFVKKLFLFFYK

SEQ ID NO: 6267 - protein, 96 aa, Enterococcus faecalis
LWKRFSNWKAISNQHDIDIYFADPGTLSQRPLNENSNGILRHNGLPKSMDFREVNQTFISSVSNQRNHIPRKSLNYRTPIEIFLSYVQEAFYSNLI

SEQ ID NO: 6268 - protein, 130 aa, Enterococcus faecalis
LEIRLTYSIGFWIACGHGGDKMSDIRNWTKIWYIERVFYKLWDRVALPRPVTQTFAIWFGISFFGGIFRIFPFVMEHTITRQIFCPWLFAFLMTRKQFQSLSSHISSHIFHHTHISWLAEKGYPLKAIMD

SEQ ID NO: 6269 - protein, 102 aa, Enterococcus faecalis
GISSEIFISCALWCCVLSLVQCVLTGRKKQMNFFQNVFTDFVGDFKYLIMLAMLDGAAYIAFERKASKAIPLILVLAVAVWLVGDTSDVFNWILDRMRSWGR

SEQ ID NO: 6270 - protein, 79 aa, Enterococcus faecalis
RYLVLSLYPVEGSINCICWIYHPSFSLVIEGTYDKKSGKYFYDFYSMKLDPKTKKSKQHRIYCTHVPVKVMYRRVRNYL

SEQ ID NO: 6271 - protein, 330 aa, Enterococcus faecalis
GAIQMLFLKKEDIIKSFSMREAIDADKKALSLYSAGKASVPLRTNIDVPKSNGQSLYMPAYVEGGEGALGVKIVSVYPENIKKNLPSVPATMIVLDPETGMVSACLDGTYLTQLRTGAVQGAATELLAKEDAKIGALIGTGGQAQSQLEAMLTVRKLEEVRIFDIDFERASQFAEEMMQQFSVTMRPTKTNQECVEGADIITSVTTSKRATFSAEWVKKGAHINGVGAYTPEMCEIPREIIKAADIVIFDTMDGVLKEAGDFISPLQDGYIQRDSYHGELGQLINEELVGRTSGEQITIFKTVGSAVLDVVVATEIVKKAKENNLGKLIY

SEQ ID NO: 6272 - protein, 296 aa, Enterococcus faecalis
EEIFMIRNILLALIVAINLYFIIYFLRDLFKNKQNFKEEPGDMRLLPFTSFITFFLSTFGVSDFAIGTVLYPKLKWVSMKKLPGTLNTQCVVPVAVMALSYITAINVGIKTLAVCIICQIIGAYLGPRFVVKLPEKTIKLFVGIGLVIAAFLIFMGQMNWIPSNGTASELYGGKLILAGFLLFVYGALNNIGIGSYALTMVTVYLLGLNPVAAFPIMMGACTFSVPIGSVQFIKFDEYSRKITLFTSTFGVLGVLVAVFLVKSLDTYILKWIVILVLLYSAYTMLSSQLKKATATN

SEQ ID NO: 6273 - protein, 267 aa, Enterococcus faecalis
SMETIIQIMKKYDFSEMETRVYTTLLEKGNLTGYEVSKISGVPRSKVYNILEKLLKKNLIVVNKSEPKLYHAISANEFLEKLEKSVKNDLSFLTKNLGMIKEKDEEDMLWKVDGIEYVLDKAEHLVKNAKESLLIQVWHENLTDSLLKALQQAEKRVDKFVLILFSSTHEYDLPLEKYYIHGFETDKLADFGARWINIVADEQEVVFGTINEELQSTDVTWTKNHAMVNLAKEYVKHDAYTLKVIAESSEELKAKYGEDFEGIRKIY

SEQ ID NO: 6274 - protein, 71 aa, Enterococcus faecalis
KKFFMKWAKKFFRPLFCPTIRCKNIVADDRLDWVYESDQQKSIGIKRNHTEISQKDKMVLIKNFLLIHLLI

SEQ ID NO: 6275 - protein, 115 aa, Enterococcus faecalis
NLPKGRPPRRQLAAENSSWGYEQTNVTFWQIIKLTEKTAWFRPIKKQTVKTYTSMSGETMPIPNQFIDYPLARIKDSIVRKQINPALYPNKLYGNRSWDTFYRYDNQLVYESSYY

SEQ ID NO: 6276 - protein, 93 aa, Enterococcus faecalis
LFPILQRMKTFYQGVSYLYTIMPALKKIYKDEPEKLKETASANLEFYNTNPQMLPFITSMQLAMYDNDQSVSDTRSIKMALMGPLSGIGDSIA

SEQ ID NO: 6277 - protein, 196 aa, Enterococcus faecalis
FGIAPLFSTIFAGLAMDGLGFAPMGFWLSMLISMLVIKLLMGYLGFKLGTSVIETLSDKIGKISSAANIVGVTVIAALATSFVKANIAIKYSHNVESGEKQVIAIQDILDKITPKMLPVILTILVFYLIKKRKWNTYQLLIFFICDWDSSLCLRDFSIVSERSKGQGFRFRVNLVSLFISFLSDGHNIFSVNGNKI

SEQ ID NO: 6278 - protein, 227 aa, Enterococcus faecalis
VMGIIFFQLTEIKFESENTMNLQKIENYQLKFYQQDWLSGYLEKHSKLLEPLFERTYFLLKDQIIYNDAMDMEACSIPYSLKEYTWNRYPGDDPEWLFMLSRQSFLLDLSQAYALTKEKCYLQKWRSLLLDFIQEEGEPNSTNRNVWRPLDVGIRVMNWLKSLTYISIADYKQLGIDKVLRNALLVHLEYLERSYIDKYRLSNWGVLVTGGMAAMDLFLPELVNRVN

SEQ ID NO: 6279 - protein, 164 aa, Enterococcus faecalis
EQSALYQYEVLMTYVYLLQISEYLEISLPLDLRTKLKIPILSTYYIADNQDVLNPINDSDHVNFRYVYDSYRNMKKELGKHCSQRNFFRGESSGLMFYKTEDIYFTLFNGLYGSSHGHVSTGSFTLQLQGDDLISDSGCYSYVNKAEWLQPKECDSHNTMFIKD

SEQ ID NO: 6280 - protein, 68 aa, Enterococcus faecalis
ETKMLVESCFLANLITTKTAQETTISQLSTASNEVLVHFISHQRRNCSNRGMMFSSLFHILVVWHSHL

SEQ ID NO: 6281 - protein, 149 aa, Enterococcus faecalis
RQKHTQEDFYMTQVHFTLKSEEIQSIIEYSVKDDVSKNILTTVFNQLMENQRTEYIQAKEYERTENRQSQRNGYYERSFTTRVGTLELKVPRTRDGHFSPTVFERYQRNEKALMASMLEMYVSGVSTRKVSKIVEELVVNPSLSPSFLA

SEQ ID NO: 6282 - protein, 82 aa, Enterococcus faecalis
SIKNCGRTCGKSVSKSFVSSLTEQLEPMVNEWQNRLLSEKNYPYLLTEFPFLKFQKKIRFPPKPSFTEWNYPRRETANFRAS

SEQ ID NO: 6283 - protein, 108 aa, Enterococcus faecalis
DFLKVLGKIGIVEEGGKIFGRREIGFSHNKGGEGFLKARHYPCGPIRKKGFRTLEHGFRLGYSRKCVPVFLAFRQLELRSPKICRFPSWVIPFGKGRLWGETDFLLEL

SEQ ID NO: 6284 - protein, 259 aa, Enterococcus faecalis
  MISC_FEATURE (244)..(247): Amino acids 244 & 247 are Xaa wherein Xaa = any amino acid.
GANPVVWTYIVDRVSAAPWVGLENFRIIMEDSFFWEAVRNTLAISLMKLFLGFAIPIILAVMIFEMRDGHLKKVIQTISYIPHFFSWIVLGGMLISWLSTNGFINQVMMSLGLMNQGVNHLLDPDKYWWIAVLSDLWKEVGWGTILYLAGMSRIDPTFYEAARIDGASKLTQIRTITLPLLAPIISLNLILNVSGLLGSNLDQTLVLMNAQNRNKSEVINSFVYRMGLNARGLFLCHGSWFREXRLXQLVLLFNYRSHY

SEQ ID NO: 6285 - protein, 341 aa, Enterococcus faecalis
  MISC_FEATURE (16)..(19): Amino acids 16 & 19 are Xaa wherein Xaa = any amino acid.
TQGDFSYATAVGLGNXGYXNWFYYSITDRITRKNEQWSVGYFIKEATAVIKRKSKENKWFYFFNTLILVLFSLLIIVPIWNILVSSVSSSSGLAGKGLVLWPKGFTLENYRKVFSDSSIPRAFLISVLKTVIGASTHTLFCAIVAYGLSKSRLVGRNIYTTMGVITMYFGGGMIPTYLLIKSLGLLDTFWVYIIPALFSYYDVVILMNFFREIPPSLEESAKIDGASEFQIFYKIFLPLTKPALATIILFNGVGQWNDFMTTKLYITKEYLYPLQMKIYEIIVQSNLSTMTESGSTDMVVQATTRGVQLATIVITTIPILIIYPLLQKHFIGGMMAGAVKE

SEQ ID NO: 6286 - protein, 600 aa, Enterococcus faecalis
NYCSIKLEYHDRERQYRYGGAGNDTWCSAGNNCHYNDTNFNHLSITTKTLYRRYDGRCSKRIKKVGNNMKKVLGGLLVATAVVSLAACSGGEKKASSDVSIKDRYELDEKTPAWKLDKKKEPTKIKWYINSDWTALPFGKDVTTAQIKKDLNVDIEFISGDDSKLNAMISSGDMPDIVTLTEKTGQAALKADSWAYSLNDLAKKYDPYLMKVVNQDTFKWYALEDGKTYGYPNYSNTKADYESGNIPVNDNFVIREDVYNALGKPDVSTPENFEKVMQQIKEKYPEMTPMGFTTVGDGAGPFLDKLQDFLGVPLEDKNGKYYDRNLDKEYLEWLKTFNDVYRAGNISDDSFTDDGATFDEKVKQGNYATMLVAGTSGQGGNFTEFMKKSGTRYIAIDGPSSTSGRKPTLNQTGISGWLSNYITKDAKDPAKVTQLFTYLIDEPGQILTKYGVEGVTYAYNDQGKIDYLPEVKKLEQTDNDAYNKKYGISRFLYFNNDRVNKLKVPMESALTQMQEWGKGKLVPHFVIENINPDAGTPEARANEAIETKLNTTVISMIRAKDDKAFDKSLEDYKAFLKSNKWDAIEKIKSEKMAENRDKLK

SEQ ID NO: 6287 - protein, 217 aa, Enterococcus faecalis
VREEERKADKATRNPLFSFNMNKLFAYEGWYYRIFSFIANLIIINFLFLITCITGIFSGVGLIALYRTIYRLYREKDIPVLRTFWTALKNNIMRGFILTGVLFAAFLLGGIVVTSLFKIATSLGFLAIFLLSFVALFLTSFLFLFSVFNWSVKKTLGETVYVVLSNSANAIILFILPLLTFVFFYKLNLFLYIALGFGTTAFLQVAFFQKVLGVVHE

SEQ ID NO: 6288 - protein, 308 aa, Enterococcus faecalis
VWYMNEYFEFWQKTKEELQKIPLDIHRRVIDYPLENVQVEQVDFLSFLGERIFGYLLLPKTAGKQPIVIDCLGYMNHIQEPWQFAHWTQIGCACFVIDNRGQGGLTKDRVPYQTIWHEAPMGRGFLDKEDWYQRRLFADHLRSVEVVRTFTEINQDQIILRGGSQGGGVVLMVNSLVDFPILATFADVPSHSCLENRVAEGTGSYQIIHQYLQEHPQAHEKIAAVLPYFDSRHFVSQIKNPVFASVGSHDPICPMKDFFPSYHQIKARKAVRVYWKKGHGGGETTQIRREMRQIQQLLQEVKNENSYV

SEQ ID NO: 6289 - protein, 291 aa, Enterococcus faecalis
RQEKQSECIGKKAMVAVKQPRSVVRCVKFNNYCRRLKMKIATYNVRVDTEYDQDWQWSFRKEAVCQLINFHDWSLCCIQEVRPNQVRDLKAYTTFTCLSAEREGDGQGEGLAILYNEQKVQAIDTGYFWLSETPQQPSIHPEAGCPRIALWGLFKETTQNTPFLVINVHLDHISAHARLAGMTVILEELHDKIAQYPTLLMGDFNAESGEEVHQLVQKKFQDSKNLATHYGPRGTFQNFTYTKPWAELEEIDYIYVKGWQVQQTASLTDSIDGRFPSDHFPLEAEVCIEER

SEQ ID NO: 6290 - protein, 727 aa, Enterococcus faecalis
KQKYVLKKGESMKENQLIQLVEEMTIDEKINQLLQLAAAFYSDKAEEKTGPMSELGLSQETIDTAGTTLGVSGANEAKRVQKEYMQNHRLNIPTLLMADIIHGFRTIFPIPLALGSTWDEAAVEKMAEISAKEAAVSGLHVTFSPMVDLVRDPRWGRVMESTGEDPLLNSRLAAAMVRGYQGENLKEDNWRVAACVKHFAAYGGALAGRDYNTVDMSERQLREMYLPGYKAGLDAGAKLVMTSFNTVDGIPATGNQWLFRDVLRNEFGFEGVVISDWGAIKELIPHGVAKDEKQAAELAIKAGVDIEMMTTCYPDYLKELLEEGRIAETLIDEAVMRILKLKNELGLFENPYRGADEQAEAEVILSKEHREIAKKIAQKSMVLLKNENILPFTPQEKIALVGPGAQSQDILGAWSWQGKKEEAISLVAGAQKLTTNLLVAQEPFDYFEPTAAAIEEALTLASQADKVVVALGETDWMSGEAASRSDIRLPEKQLAVVAQIIEKNPNVVVTVYSGRPLDLQGIDVAKGIVQAWQPGTEGGNALAEILWGQYNPSGRLSMSFPETVGQVPIFYNVDNTGRPYESAPEEKYVSKYLDVSNYAKYPFGFGLSYSHFSYQPIQLSALTFTKEQPVTVSVLVRNNSPIAGEETVQFYVRDLVGQVVRPIKELKDFQKVWLEPKEEKEVQFLLSEDMVRYVHSDNQVTSDAGEFIVMIGGNSRDVQTATVTLNE

SEQ ID NO: 6291 - protein, 1092 aa, Enterococcus faecalis
VMQIKKLKQADTVATFLETGDLKELNSCGMMINQLEGNPLDGSMNQLYLRIITGDTINYRPMIGSNSQSDFYLSDNQLTWRGEFEAVRYQVDFRLGPSNQWFWRVNVTGTGLVDIVYGQDIGLATKGAVQSNEAYVSQYLDHHIWQEGEELVVLSRQNQPQNEKFPALIQGSFQKLVGYSTDGYQFFGRSFKQINTPEALGKRYLANEVYQYEFAYTALQTEAVQLTNESKEFVFYGAVTETHPQALAEPFLSKEALQAIYETVTFDSLEGTQDYPPKLLGEPITGNPLTEEELAALYPLQTQIEKVAGQTYSFFTENYHHVVLQEKEIAMERAHGHILLSGKGLTVDEPLLSTTVYMYGIFNSQVVLGNTTMNKLMSNSRNALNVMKRSGQRIYILENGLWRLLTMPSAFEMGLNSATWYYKLPKDTIRVRTFTSPDSRVIQLEVTSQKDAYMWAVSNHLLLGPEEVPTYQLEQTGKTLRVTGNHSATENYYPELTYALTVDKSFQVTDSTLFGGAEAELLVLAIEKTQKFSLLITGSIEDQSLVNTPLDFEKAESQYLAFINGLLHHFELTHTDSSVQQMNQLTRWYTHNMLVHYLSPHGLEQYGGAAWGTRDVSQGPTEFFFATQQPKIVASIIQHLFENQFEDDGNWPQWFMFDRYEEQKASESHGDIIVWPLKVVTDYLEQTADYSILATEIPYTSRKDNHKTKETASLFEHLKKEINYIEQHFLPETFLSCYGDGDWDDTLQPYDNRLKEQMASSWTVALTYQVLKKFAALITEIDATYSQHLAILVAGIKNDFQKYMLADETIPGFIYMETPETFEQMIHPNDQKTGIQYRLLPMTRSMLAELLTPEQVSHHLEIIEKELTFPDGVRLMNKPANYRGGVSTNFKRAEQAANFGREIGLQYVHAHIRYTEAMAKIGQRDKTWQALMQINPVQLKEVVHNAELRQANAYFSSSDGDFKTRYESQENFGKLKDGSIGVKGGWRIYSSGPGIYLNQLITAVLGIRQKAQSVVFDPMLPEKLSGLTLTYQLFDKPVTYKFYPNQSAKIVIDGQEVPFKFEENPYREGGMEVQKDEVLSLLNEASVIEIYH

SEQ ID NO: 6292 - protein, 322 aa, Enterococcus faecalis
SMVGIKDIAKKAGVSISTVSYALNGSSKVTEETRTRIQAIAEELNYVPNMAARTLKRRQTNIIGVYLADYGGSFYGELLEGIKKGLALFDYEMIVCSGKKSHLFIPEKMVDGAIILDWTFPTKEIEKFAERGHSIVVLDRTTEHRNIRQVLLDNRGGATQAIEQFVNVGSKKVLLLSGPEKGYDSQERLAVSTRELTRFGIPYEIIQGDFTEPSGYAAAKKILSQPQTEPVDVFAFNDEMAIGVYKYVAETNYQMGKDIRIIGFDNSELGAFVQPRLATIAYSKHRWGMVAAEKIIHLMRGEAAESEHIYTRFIEGESFPSE

SEQ ID NO: 6293 - protein, 186 aa, Enterococcus faecalis
GLYMRKPYILMSLLVLSTLLSACSTVSGSPASQSAPAPDEVLATSIGTYENRTLLVPDGRLALTALHKGKDYQGKPMFYVLFELTNTTEKTQNIQLMIQSFMEVSQTVHGKAQNLQYAVLTDSPFQDKLDRLADEINPGETIQGAYPYEFINENKPVHFKFRDRLLSLDEPIASEEITITEKSLVR

SEQ ID NO: 6294 - protein, 241 aa, Enterococcus faecalis
RRTLMRTNTRYKEIYAAIKQDIEAGVYPINQKLPQGRLLAEKYQVSELTITKALHLLVQEGYVVRRRGSGSFVQDFQNRTITKFSPLTGTYSTYDGKVESVVLGFATEVPEPWVTEKLSITEEELVYKIIRLRIIEDVPSIIEYTWMPVALIPNLTMKELKVSIYQYISEQLHQKIQSARVSISGIRPSPLEKKYLNLTDNDFLMRAEQIAYLGNGHIFEYSIANHIPSEFTFETVLIAEK

SEQ ID NO: 6295 - protein, 485 aa, Enterococcus faecalis
HRKEGGMTMEHHQLKAFPQDFLWGSASAAYQVEGAWNEDGKGASVWDEFVRLPGKTFKETTGDLAVDHYHRFKEDVALMKQQGLKAYRFSIAWTRILPEGRGRVNQAGLKFYSDLIDELLAAGIEPMVTLYHWDLPAVLQKEYGGWESRKIIDDFVAYAKILFDAFRGKVRYWISLNEQNVFTSLGYQLAVHPPGVTDNKRMYEANHIANLANAAVINAFHELEMPGKIGPSFAYTPVYAVDAHPANVLAAENAEDLLSHFWLDVYLWGEYPIAALNYLQEQGVAPTIKEGDLALLRSAKPDFLGINYYRTDTVAANPLDGVGIGKMNTTGEKGSETESGVPGLFKKVNNPYVERTNWDWAIDPQGLRIALRQLASRYQVPILITENGLGEYDTLTEDKQIHDTYRIDYLRSHIQAIQEAITDGVSVIGYCTWSYTDLLSWLNGYQKRYGFVYVDQDETQKGSLERIPKDSYYWYQKVIETNGLI

SEQ ID NO: 6296 - protein, 355 aa, Enterococcus faecalis
EKSVENMTVKMGFIGFGKSANRYHLPYVMIRETLEVKTIFDLHVNEKAAAPFKEKGVNFTADLNELLTDPEIELITICTPAHTHYDLAKQAILAGKSVIVEKPFCDTLEHAEELFALGQEKGVVVMPYQNRRFDGDYLAMKQVVEQGFLGEINEVETHIDYYRPGSITEQGPKENGSFYGLGIHLMDRMIALFGRPDQVTYDIRNNEVSEAVDNYFDVDLHYGSKLKVKVKTNHSVASPYPRFIVHGSNGSFIKYGEDQQENDLKAGIMPDAPGFGEDSPMYYGEVTYRNGNGDWIKKQIKTPVGDYGRYYDAVYETLKNGAPQLVTKEQALTNIEILEAGFLNPSPSVYHLKEN

SEQ ID NO: 6297 - protein, 73 aa, Enterococcus faecalis
QAFFSLKNYFMKYTNINYKVVYLHLYWIFDILFKALQLSEHHKRHFSSNSWGSSATKMSFHFFIFTNNIRFLY

SEQ ID NO: 6298 - protein, 172 aa, Enterococcus faecalis
NRKDKKVWLTKEPNQKGGQPVESWLFLLLIALIAFVAKNQSLLIASVVVLALKALPNSAKIMSWLSDKGINLGVTIISITILVPIATGQIGLKDLIQSFKTPMGWLGILCGILVAVLSSKGVGLINQSPEITVALVFGTILGVVFLKGIAAGPIIASGMMYVIITTFQVFQH

SEQ ID NO: 6299 - protein, 156 aa, Enterococcus faecalis
LSPFLLLFSKKAVKKQANNKTFEERHSDKLPSSFYILFKGVRQMSLTISEEVKQRLAPFLTETNTFLLVANDGSNPYSSAEGCCMIGDRFIIVPVDQAEAPYTETIANDSFHVYTSTYDQMFLTGHLQLVIHPNAGTITLKNESGILDSNVDIYQH

SEQ ID NO: 6300 - protein, 81 aa, Enterococcus faecalis
KVGMFAVIGALGLGVAFRDSFTELSTPKKAAIILSYVGAIGSTVLGFTSATKNPFVLAATVVLVVAFSIALFKKSSKETSK

SEQ ID NO: 6301 - protein, 264 aa, Enterococcus faecalis
  MISC_FEATURE (4)..(258): Amino acids 4 & 258 are Xaa wherein Xaa = any amino acid.
KVRXLQNKKVEQKEEENKMALIELRHVKKEFSGKAGKVTALKDIDLTVESGDIYGIIGYSGAGKSTLVRLLNGLETPTEGEVEIQGQDIALLPNKELRNFRKKIGMIFQHFNLLWSRTVLENIMLPLEIAGVPKQNRKSRAEELIKLVGLEGRETAYPSQLSGGQKQRVGIARALANNPDILLCDEATSALDPQTTDEVLELLLKINQELNLTVVLITHEMHVIRKICNRVAVMEYGEIVEEGKVIAIFNKLQKDAGXAPMVAN

SEQ ID NO: 6302 - protein, 261 aa, Enterococcus faecalis
CLFPMRKVDKNGKKGFGSTVIPNRGAWLEMETDAKDISYVRIDRTRKIPLTVLVRALGFGSDDTIFEIFGDSESLRNTIEKDLHKNASDSRTEEGLKDIYERLRPGEPKTADSSRSLLTARFFDPKRYDLANVGRYKVNKKLDLKTRLLNLTLAETLVDPETGEIIVEKGTVLTHQIMETLGEYIDNGLNSVTYYPSEDAVVTEPMTIQVIQVLSPKDPERIVNVIGNGYPDEHVKTVRPADIVASMSYFFNLMGRYRQCR

SEQ ID NO: 6303 - protein, 223 aa, Enterococcus faecalis
MFTKQTFDNNIYMKIFRWLYILFIGNLGLLLVNIPFFIAVISLDIDPRNLPLFVVTLLPMGTGMIALLGLIDTFKEEKELDPFKTFFQKFRQFGLRGFLISLLGLGSSIISVTDIFFFAKTTIGKWFIPLMVLLLIFGLAIMLNAWYFQVRNPQASFKDVFRISVYYGLRKWYVSCLNVFLLFSMFAMMFLKPQFGFVVTPVLFLGIIYLNTGKLHEKQKKNK

SEQ ID NO: 6304 - protein, 305 aa, Enterococcus faecalis
MESTSRESLGGEKMEATFSKKENTRKAKTKKAEKVTPGGILVIILLTLLALITLVPFIWMVSASFKTNNEVFTIPIQWIPKSWHPENYSVIWERIPLLTFFKNTLFLSIVITIIQLFTSSFAAYGFSKMNFRGRDTLFITYIATIAIPWQSYMIPQFIMMRQLGLTDTLWSLVLLQAFNAFGVFLLKQYYSSIPDSLCESARIDGLSEWGIYWKIILPLTKPALASLTIITFVNTWNDYMGPFIYLSSTENKTIQLGLKMFVGLFDAEYALIMAASVVSILPVGIVFLAMQKYFVEGIATSGMKN

SEQ ID NO: 6305 - protein, 304 aa, Enterococcus faecalis
QNTIMEITSKTKTANKLRRKNTWTALSFIAPNFIGFFLFTLIPVICSLILAFMSWDSFSTPEFVGMKNFTKMIHDDTFWISLKQTFIYTIGVVPLTLICSLGLAILLNRKIRGMKFFRTAFFFPYVTSLVAIAVVWNMLFHPTMGPINQFLKLFIENPPGWTSSSTWALPAIIIVSVWRFMGYYMILYLAGLQSVPRELYEAASMDGAGKWNQFLNVTLPSLRPTTFFVTIMLVINCFKVFDLVQVMTGGGPGRATNVLVYEIYNEAFVKFNFGYASAIAMVLFIIVLAITVAQFKWNQHQEKV

SEQ ID NO: 6306 - protein, 73 aa, Enterococcus faecalis
IILVKFFIPTNSGVEKESQLIKAKISEQITGIKVKRKKPIKFGAIKDNAVHVFFRLNLFAVFVFEVISIIVFC

SEQ ID NO: 6307 - protein, 431 aa, Enterococcus faecalis
IAEVVQMKFWKKGLTAAALLAVAAVTLTACGGSSEKKATEKSEDGKTKLTVTTWNYDTTPEFEKLFRAFEAENPDITIEPVDIASDDYDTKVTTMLSSGDTTDILTMKNLLSYSNYALRNQLVDLTDHVKDLDIEPAKASYEMYEIDGKTYAQPYRTDFWVLYYNKKMFDEAGIAYPDNLTWDEYEALAKKLSKPEEQVYGAYQHTWRSTVQAIAAAQNNANLIEPKYNYMETYYDRALRMQKDQSQMDFGTAKSTKVTYQSQFENSKAAMMYMGSWYMGTLLTNIDDGKTNVEWGIAEIPQQEKGKATTFGSPTSFAINKNSKKQKAAQKFLDFASGKEGAKLLAEVGVVPSYKTDEIDKIYFARKGMPSDEVSQKAFNPDTINLEFPSDKNGAAIDKVLQEEHDLIMVGDEKPKDGIANMEKRVKAEID

SEQ ID NO: 6308 - protein, 385 aa, Enterococcus faecalis
GEKYTMTENGQIEWLPKQISFALNKVRGNLETFKELVPPAASLNQIYYPEENIDWTASFWPGMLFLAKELTNSTEFDEVIATQMASFQHRLDEQIELETHDIGFLYILTAIADYQVNGHEASKEMALQAADLLMKRYSPKAKIIQAWGNLDDPEQRGRMIIDCLMNLPLLYFAAKMTGKQEYYEAAYNHAKQTQKYIVRENHTTFHTYYFDTETGEALYGKTQQGYSDDSCWARGQAWGIYGFTLSYLYTGDSSFLETAKNVADYFIQELPEDKICYWDLIFNEGSEEERDSSSAAIAACGLLELSRQLPLNDEKHGYYEKVALELLQALAEKYTTVLQPESNGLLLHGVYDKKTNTGVDECMIWGDYFYLEALTRLAKSWYSFW

SEQ ID NO: 6309 - protein, 605 aa, Enterococcus faecalis
LKVRRIMIQPRIRQNPFETYEEVAEGFEDLLAPLELFFDREYQGHLDLGTHGTVYSKGTRDAEAFLRPLWGLGPYVTQNESEYLNDFLTGIIEGTDPESSSYWGKTKDYDQLIVEMAALSTFLLLNKEKTWDQLTKEQQNNLHSWLIQANENIIPPNNWHFFRVLLNLAMKHCEMPYSKEQIAVDLAVIDRFYVGNGWYYDGVETQVDYYVSFAIHYYSLLYCRFAPEDTARVAIMKERATLFAQEFKYWFTQPGEAIPFGRSLTYRFAQVSFFSALVFADVEALPWGEIKGLISRHLHQWMNKDIFTTDGLLSVGYDYQNMVFAEGYNGPGSPYWAFKTFILLAVPKDHPYWQAETQPISFPEKHLPSPESRNYYQVNDAGTHGLMFPAGQFINYQAHAHDKYSKFVYSSHFGFSTIKSDYWYYEGAYDNCLALAEDDHYFRTKGLDDQYEILDDRIIHQWHPWSDVAIKTTIVPLEGQHLRIHEIETQRALVAYEGGFSIPLFDEKVTCVSDQMAEVKNAKGVSKVENINGFSEAAIIRTEPNTNLLYPLTELPYLKANLSKGKHLLISLVTGVLPNEQIEPVKVRLKENQLLVEEKVVILGN

SEQ ID NO: 6310 - protein, 135 aa, Enterococcus faecalis
FDGEGGLVKRFSFFLLILLALTGCKSGEKEFDEESLQNLKETAQSYSETELQNGDVRLNEYISLKGEIVESDSRSSLIKKGDRFILKSGSSKYQVFNEQKKKLKIGDEVTVYGEYYGFLKGTLIESEENHDSATN

SEQ ID NO: 6311 - protein, 341 aa, Enterococcus faecalis
KKVKKAFSCFFLLKRNILYAIIVLEKEAFRMATITDIAKVANVSISTVSRVLNYDPNLSVTEETKRKIFEAAETLNYAKYKTKNRNKQQEQLTPNLSVQTAPQEPSIAVVQWRSDDEELTDIYYMSIRLGAEKRAEELGYNILKVSQLEQHNLQGIDGILAIGKFTQKTLQELQQLHPNLCVIGSNFPLEEFDSVNTDFYQATEIALTHLLELGHEKIAFIGAEESENMYGFRRYKTPTTNAYLDIMQHYHLFNEDYFILKENGMLDVKTGEQLTEEALEKWGNDLPTAILAYNDAFAIGVIHTLAAHGIKVPEEISVMGINDISISQYVLTAAILCPCLY

SEQ ID NO: 6312 - protein, 73 aa, Enterococcus faecalis
RFLKKLVSWGSMISLFLNMFSPPLSSVHAFTEEMGETGINLLHKRIQMPSILRRVLLNTELVVRQSTTSPRQK

SEQ ID NO: 6313 - protein, 288 aa, Enterococcus faecalis
YIIKVKLGGKHMTCISLSILNQEQEVRKAKIDDSDSLKELTITGKDFVCLAARDCQLQDGDVIQVCLDTPNTYLMVKLDATLDSSLIYVPEQKWTFPIIKNENAIEARAAYRFETKKPYISVRIATKEEIKSYRNWALNPHDLQHFTGAYPHASANVETRNDATFFACNAIDGTFANLYHGPYPYQSWGINQQLDAALKIEFGREVLLDKVILTLRADFPHDNYWQQVTLKFSDGTHEVFKTVKTEQRQSFTFAKRAAEWVILTELIQADEPSPFPALTQIELFGQNK

SEQ ID NO: 6314 - protein, 394 aa, Enterococcus faecalis
RSLTHFLGGIILMRRIANVYKDEKRGTWYFSLTLGYDRFGKRIQPTRRGFKTQKEAKDAMEELKKNYSDSQEIYLQGITFREFYKKYFFPWYKLGTIEKTYVKTDKTLKRALAYFGKMQMEKIRPIHIQEFQQFLVQECFVTNKEGKIRPLSNNYIKQIFNKLRIIFKRAMVLEVIDENPVDTIGKIRTQRSVVAFWTVDEFKKVYNCSYRCDFQEAFYKRMMRFLFVTGLRSEELFALQWPDIDFHKGTCCVNKSLYIRTRTDYDFSDTKNASSIRTITLDKQTIVDLREWKETQKTIGDDLGFIFTFDGLPPSPKTFLGRVKKLAEIAGVKPIHLHGLRHSHVAFLIEHNNNIYAVSKRLGHSSVKTTLDKYGHLYPNTNQTLADEFTKFEV

SEQ ID NO: 6315 - protein, 71 aa, Enterococcus faecalis
ELTAEKEGGRMKTATRQDIIKLGFSQYYADKIFKECKTLLITKGYSFYKNKKIKRIPVSIIEEVLHISWEE

SEQ ID NO: 6316 - protein, 74 aa, Enterococcus faecalis
KKVISVWRKYEMKSLVELVILVQKDDEEAFAQIVNKFKPLLIKESCRNGSFDEDCYQECMIRLYLALKKFEIRE

SEQ ID NO: 6317 - protein, 61 aa, Enterococcus faecalis
TRCNKKASTYSKENTRTFTTLVKKIYKNRDPPELSLKKSDKCLEEIRNEIIGRTCYFSSKG

SEQ ID NO: 6318 - protein, 163 aa, Enterococcus faecalis
EDIGSIETHPNLSVYLFPFEFPKEEVAAMKQNFDVTKYDAQIINYIKKTVHNTAINYFVKNSRIEEAEVISGQKFLDFLIEDKTFFVKEMIRVETDNLSFEFDNLDLATEFEKLNREEKSFLMRKYILGYSDYEISIQLSLSRQGVTKKRQRILKKIRERLLR

SEQ ID NO: 6319 - protein, 185 aa, Enterococcus faecalis
AKNLSYLKNKFQSYRPVSYSPFVFNNERGRENMDIRDEKCHVYEQLKLLMEERRELSRQYYDLKEYLIHLEEDKIVSDSSDELSQETKFSNFKSEKVLQDYLIQRKMIGTHQRNYKDYGFIIASILKESGKPLSGKQIYQELAKNNDILPDYRNFVNNILPKINRDDSISVERAMRGYWQYRNTP

SEQ ID NO: 6320 - protein, 255 aa, Enterococcus faecalis
YFYLIKKGGSSMTRVLIIARSPLAEQELECTLQRSFDEVFCSSELMKEVEKYSLVTQYFSVVIFSDTISTSEMATYLPYFKKLGLSILRKGQKDQLKTTEYTYLIDEIDDWFDEQTSPNVLIEKIVKLDNKSQKNRIPNLRIIESVQKSIVKRDQVIIYFTKNERKLLYYLYKSKGKCVSRRELCQLMWGEEISNSSLSQLSTLVAHVREKLTHVGFEELWIKTIWGRGYILSDEFIDYLSQNNTFSKGRVSKLL

SEQ ID NO: 6321 - protein, 78 aa, Enterococcus faecalis
YTIGGEFCLYEYGLILESYSCLTFLYFVIKVWSIGCGHWWEINRIISRLWFDVYNLVYVVEAAYYILIMLSSLIFLSY

SEQ ID NO: 6322 - protein, 1005 aa, Enterococcus faecalis
LMKKRVVMTIAGIMGGTFTSSAVALAQTKTSVEERGPVQESTISIPDSEILAEEKEVAATIESTTTTSTIKTTSDSLEKALEATTSETSSTESGSASQSSASQHRKEIETEETSLKAQTTSTVLTGMIGTSQWSLDPTSGELTIGPGVFSDDVSSAFDSISNVKKVTFSGPVKAGKSLKSLFSSWFALLSIERLDYLDTSQVTDMSYMFTNCTGLQTLDVSNFDTSQVTNMSMMFYNCRGLQTLDVSNFETSQVTDMSYMFDACSGLQTLDVSNFETSQVTDMSSMFDACSGLQTLDVSNFDTSQVTNMRGMFFLCTGLQTLDVSNFDTSQVTDMNNMFAGCKALQTLDLSNFNTNQVTDMAGMFSSCDKIQTVNVSNFDTSQVTNMRGMFSHCWELQALDVTKFDTSKVTDMSDMFYGCKELQTLDVSNFDTSQVIYMSDMFGECSGLQTLDVSNFDTSQVIYMSDMFGECRGLQTLDVSNFDTSQVINMSSMFADCRGLQTLDITNFDTSQVTNMSSMFADCRGLQTLDITNFDTSQVTNMSNMFDGCRGLQTLDVSKFDTSKVTGMIYMFRDCSGLQTLDVTKFNTSQVTYMWNMFSGCSGLQTLDLSNFDTSQVTNTDEMFDNCDALKKITLGAKSIFGTKTNTNLPSIADTSLYTGRWIGVNTSNTYSDSNTFMSNYDGSVPDTYVWEKASVLNSTLEPSSVRVHSESEVEWTWKITNSSSKSAENVYSDITLPEGLKIDKNSVKKNNLPVSVDDINGMNNLGTLSSNETVTFTFKTIVSGKPDKWLELMGKVTWEDNGIRTVNSSNKVKIIDEEQKDKGNQTNDLELLSVPVGFRYGILNKSNTPQTIHLNARNYQTHTNVVTDGFYTRLRDDRTKDNGWKLTAQLSDFSDETNSTVLTNSGIALKMENMKIESIKNRDTPQESIDQNPTGTPSTVSTNETLISGQAAKTLINAQANEGHGTWQVRIPFDKVSVTVPANTGEINKNYTATLTWSLDDTP

SEQ ID NO: 6323 - protein, 80 aa, Enterococcus faecalis
KVNGITSRLWFDVYFFIINSCICSIISQLARTVTVFSKLIKRSNFNDEGKMCHLKIVNLQLSNGKKAIASWFQINQLKAL

SEQ ID NO: 6324 - protein, 502 aa, Enterococcus faecalis
VPFTRGETLYCSSNQLTTLDVSQNTRLHLLDCSYNQLTVLDVTNNVDLAILVCLSNQLTVLDVSSQNTNLFSIDCSYNELSDITNLNNLTNLQTFDASEQTISIPVPTISNSNQASVDILKTTAHRGLTPSNISIDPSPSFSTNGDQIMLSSVTRESMINKSIRFSYAPQDLIEGSTTGTKSFSGTINFFEVSNLTSDLKPNLKKVYSGDKVEWTWEIINTSSKQASNIYSELNLPVGLIIDQNSIIKNGNVATINDLNGTNNLGALDSNQTIKFTFETIVSGNSGEWLELNGKVNWEDHGARFVTSSNQVKIIDDEQKDKAEETDELEILSVPQSFKYGILNKSNVEQIIHLNTNNYQTNTSVVTDGFYTRMRDERPSLSGWKLTAQLSDFKDVTNSTVLTNSGIALKMENMKIESIKNRDSPQESIDQNPTGTPSTVSTNETLISGQAAKTLINAQANEGHGTWQLRIPFDKVSLTVPANTGEINKNYTATLTWSLDDTP

SEQ ID NO: 6325 - protein, 76 aa, Enterococcus faecalis
YRTIPLSTEKTAPQIEQEFLQNGVRLFHSSRFTVQNQPDAFLRISLASNQLEVLAKGLTIIQELLPTLNEKKGHSL

SEQ ID NO: 6326 - protein, 171 aa, Enterococcus faecalis
GIGERINHYPRTLTDIKRKERTFPMNSLPIFEKAVGTITLLSEEKQNAEYEGFLCQVNESQQLIRSRLAKKTPKKEGYFVAFWEKNQQNQNEAFDATEAPEMLAIVIADQEKQGLFLLPKECLIQQKILKTHQQKGKMAARFYPSWCQNLNQTAKKTQKWQLTYFTDLSKY

SEQ ID NO: 6327 - protein, 439 aa, Enterococcus faecalis
KCKRNHFCWNAKKGSRVMSNENIVLARNTERAPKHHFAAQTVAFSHYNHLSAQLPIEPTFGQLVEGGIRAQATQCLKNIQAVVESINHVMSDIVRMTIFVKDMRDAAAVEEVYAAFFTHYYPAKTVVAVADLPLGASVQMEALVSNGEGTIPNAPQAGDLIKLTNQTVQAPIDALASQTVAFSHYNNLSAQLPIDPQTGRVVAGCVKTQTKQCLKNIKAILTSIDVPFDDIVKINIYLKDLSKLEAVNQVHAAFFPDSGIARTVNYMPARTVIAVADLPMGAAVQVEAVVSHGDGTPPQAIEDRHGLIIEANNTEHAPKCPFSTQTVAFSHYNHLSAQLPLDPKTNALVAGGIKEQTTQCLENIKAIIESVDHSLADLVKVNIFVKEIEELAAVDDVYQTYFPERTPARRVIGVTDLPKGAHIPIEAIAGNAEGTPPIG

SEQ ID NO: 6328 - protein, 344 aa, Enterococcus faecalis
KVSFPLMREENIFSVEQLEELVAKASQNGYTDVQLILGNDGLRFILDDMSVNVNGKKYNHNRVSKAIQRGNNAYYNDPNGNALTQKEMDRLLAFAKARNINIIPVINSPGHMDALLVAMEKLAIKNPAFDGSKRTVDLGNQKAVNFTKAIISKYVAYFSAHSEIFNFGGDEYANDVDTGGWAKLQSSGRYKDFVAYANDLAKIIKDAGMQPMSFNDGIYYNSDDSFGTFDPEIIISYWTAGWSGYDVAKPEYFVQKGHKIFNTNDAWYWVAGNVDSGIYQYDDALANMSKKAFTDVPAGSPNLPIIGSIQCVWYDDPRRDYDFERIYTLMDTFSENYREYMVVK

SEQ ID NO: 6329 - protein, 556 aa, Enterococcus faecalis
AGKDFYRKYSFFQFLFCKFVIFCYSIDGCVCAFFLGGYTKMNGVQKGMVFKVGNNLSTRKGENRETIVSWLGLSLLVGLAFILFSLFHQPMISQANEPTQEKHFMVYYRAWRDKTMQGVNTTLPDENWLTMHDIPYGIDIVNVFSYVPKGQEALAQPFYDTLKNEYAPALHARGVRLVRGIDYSELLKVPYAGTTPTEAEFDAYAKELLTKFVDDLGIDGLDIDMETRPSEKDIVLSNGVIRALSKYIGPKSGTDRPFLYDTNAEYLPPLQDVSDCFDFLAYQQYGSDDQRTQRALNNLSPVLNGERFVPGLTFPEEQDRNRWYDTKEPYMESNMYKVARYSYENNLGGMFLYALDRDGRTYNEDDLNQIKPSNLLWTKTAIAESKGVSLAEMKAAAQHYLKRISYANTDLEAQNKAAEAVTQATTLYDVNKAILGGDYGQGISNTYDAELEKGLLAIDLTTLYRALDQAVTAIEKAESYTPETIQALQTTKETVATELAGKTYTAAQVTTWQTEVQTALDNLKEKQTQPLKSVFSIDAGRKYFFRGATGRISGQS

SEQ ID NO: 6330 - protein, 70 aa, Enterococcus faecalis
KHCTVKGLLYGLFTFTQLYGLYLFLETYNDNLKKNSNINHDMRYHLDLKHRAVIDDEINFKRVDPKKFKQ

SEQ ID NO: 6331 - protein, 400 aa, Enterococcus faecalis; identical to SEQ ID NO: 5827

SEQ ID NO: 6332 - protein, 132 aa, Enterococcus faecalis
GSTAWILFTLFRKVRAKLLAITDLGGVEMSIALPKQKHLRGPLLDYLRIAEDNGDLFAWRKACEIGREIFSGDFSDNAKPLIVIYKDGYSEVFNTRADVISACRIGNETLRKCLETGEQDRLGRCYDYAILE

SEQ ID NO: 6333 - protein, 257 aa, Enterococcus faecalis
NYEFGGGAMGKNLLREKKRLIRQKILFLTGENESWMKNPEIVKEVQRLSKQLESDLIADKRPLPSLDPDKLTKEKYQHFLDLGYQVGDIKKALGLGTTTFQNWRKANGIENKINRKQKKEESKLMKFNINTASLLLPGTFGAEGKECITISKSGLALSGPVVRRLNKPEWVQLYLDESRLALFVIPCKATDEGARSCVNPKSKKKAGYRKSWSGSILEKVSKASKMDIENHRYHVEPESVEGNPTALGFDLTKAVKN

SEQ ID NO: 6334 - protein, 70 aa, Enterococcus faecalis
IDEGEKMKIIKIRIFINTGSFTMATFDTEIFAETFKNLTSILNDDKYKYKFVKIGDVIIKPVEITRIIKL

SEQ ID NO: 6335 - protein, 79 aa, Enterococcus faecalis
KEQNMKFKNVELISKNGIDKKIESVDIDELTKEEYVMLRNLGLGDQLSHKTSMTLNEIEIKLDIFGKVSISQGFYVLIN

SEQ ID NO: 6336 - protein, 121 aa, Enterococcus faecalis
LESGRSDYLDRIKKIMELKSRAEALEVMEESLKKGFKYVVRDCDSEYLSFFSLKPKKYMDLGSWGYVNENAQGALPSIVVLRNTDITEISWSNKQPIIITEFLKYQKAGLEDELFRVEEAE

SEQ ID NO: 6337 - protein, 113 aa, Enterococcus faecalis
IFEVSKSWTRRRTFQSGGSRVKQFNIELVRRDKVKVELDPNFFNEEWFKEFRQFFYDYETLEEIAEYIAFNVVHNNNETFIDGIGIPLQNGKRPYWIKKDEEVNEHINVIYKL

SEQ ID NO: 6338 - protein, 117 aa, Enterococcus faecalis
VGGSGMNQRQKKKRMTKALKILNQAEVIEFDCEGEDVLYIDIEDTPENVKLVTKACSILGLDKKKFIADCREDRQDEGTLDLSSGWFTLIRVEPKKFTIWYSVANGFYLVRCLDEEN

SEQ ID NO: 6339 - protein, 146 aa, Enterococcus faecalis
GKLMSHLTNNELLIISFLIKDGIKAFDFRGGFRDCWFTEKESNELANKIEKISDIIFERDRDEFWYENEDNDRVHHLKILPKYFEAVVSGDKCFEIRRNDRGYKVGDILRLNEYQDGQYTGRFHVVEITYITDYAQQDGYVVLGIK

SEQ ID NO: 6340 - protein, 105 aa, Enterococcus faecalis
MKIIAKGRGTGKTTELVKESARTGQYILASNKSHVRAIEQIAKKAGVTIPYPVTVDEIVSMDRFTCASSIQREGLLVDEAIMVLSKLIGLKITGATISLEGEQQC

SEQ ID NO: 6341 - protein, 72 aa, Enterococcus faecalis
RRTTMLSYPELYILGRQVDGVYVEYLHGSEQADLFFDYTIARDERNHMNKTNMKDGAWEILKYGSPITLKEN

SEQ ID NO: 6342 - protein, 64 aa, Enterococcus faecalis
SEVDYVDFKPAKLSELENFDGKHVIILVSNGQTKVADLPEHGIVEVISHAGKVTFIEQKIKEKF

SEQ ID NO: 6343 - protein, 207 aa, Enterococcus faecalis
VSFCIFIRRSDSPMLDQHGREILIQEYKSDLKDASRQHRRIAKKKYQIEKNGRLETIDDRTAEDIKEQSIYAEIISSTKYALYWLEHGIERPLDEEAAKKIPKYRRAKHITNMDKISYEIYCNQYESARNYPITEEKQEMLIQLKELLSTFSERERDLFDYIHNQQLTYAEAAEKMDIKVGTAKSMSQRIRNKIDAYFEYGHQISLF

SEQ ID NO: 6344 - protein, 91 aa, Enterococcus faecalis
AFHTNLNRGYIMNYWYISLSKNYPPKITRQVELHRHYAVVECIQRVNKKEMVALELNFLGYGFYKDNHIQENLTHKKRSVRYERTNQSISQ

SEQ ID NO: 6345 - protein, 247 aa, Enterococcus faecalis
HIKKGVFVMKELIKVSVNENDEQLVSGRELHEFLLVGTPYKRWFVRMTEYGFAENVDFTVIAKNVHDETAFGGVRTVTDHAMTLDMAKEISMIQRTDKGKQARQYFIQLEKAWNNPEMVVQRALQIQTKKVEALQLENEQLRPKALFADAVSVSHTSILIGELAKLIKQNGVDVGAKRLFSWLREKGYLIKRKGTDWNMPTQKSMDLELFEVKETTIARSDGSVSISKTPKVTGKGQIYFVNKFLSE

SEQ ID NO: 6346 - protein, 234 aa, Enterococcus faecalis
DSNSHCFNSPNSTRLRVSIILYFFDIKFSFTTIISRKEENIIFSCYMFYLLQCFCIYICIRKATVIYMLLYTQEEIIMELKTLRALTLKHINLSINMLNNPGLFNTSDSSFNILIEEQIFITLAFVGSFLERSNKNIYKDKTLLGYKYLWNYSKHGETPFKFVALDVKPSFTFPLVITKKFIFGKSYCVWDEMPFDDDPRNKKQFAAYQETLQGKNMKNSLQELLTIIEQLNEI

SEQ ID NO: 6347 - protein, 241 aa, Enterococcus faecalis
QLKIIFSSFRDIIVVKENFMSKKYKIIDTLSRVEFGELKQCEFESYKQFVKKYKWFENVFFSFELANKSVKQFKDFEKHINSKENKYDINEIHATGLYHITSLVLFLRLFIDNSKSYSTKVSSECKLFIKKTEKNPSIKILKALRDYSQHYHLPVENTHRVYDIFNETMTTKFIITKSDLLKNKENKRNLAIIEQYPDHEINIGEKIDECYQTNYFSLWEIILEEFTNSYFRKRPKNILRK

SEQ ID NO: 6348 - protein, 247 aa, Enterococcus faecalis
KGEVKLMANQMKEPTKKIKERYDLFVDYYLQSFNATKAAVLVGYSEKTARQQGHKLLTNAYIKEKIQLEMKRLRDRMKDEGLRSFSMLLDIAMQTEGKIQAHNEAEIAIDKIKSELSDLELEMLKADNDLEKVQKAADAIDGRKREMKSHKRSLLEQIDSIKKEYFELNLERVVLLNELSKHQSRYLDAKEWEKLQSLKKSIFQDILDRGGFKAIDQIQHSGKVDVNPLANLSEEELRRLANGPRAT

SEQ ID NO: 6349 - protein, 479 aa, Enterococcus faecalis
QMDQEQLDALANAALEELARRNYGDFFYLSHGKQWDLLRHQKYITDRLQKIIDGEQKYYIIEIPPQHGKSTVITETFPAYYLMRHPDSLVMVVSYSKELFQKFGRKNREKFRLFSDQLFGLQISSETSSVSEWGVEGHLGSLYSTSILGGATGRGARLLIIDDPIKNRAEAESKTIRDKIYNEWQDTFYSRLTADASVIVIMTRWHEDDLAGRLLKEQTLPWEEIKIPAIAEDDDLLGRKPGEALAPEIGKDEEWAAKTKAVTGSRGWAALYQQRPTPAGGNIFKRSWIKFYVPTLSKKIELSLGDDVVILPRLFDRQAQSWDCTFKDTETSDYVSGQVWGKKRADFYLLDRHHERMGIVETMKAIDAMAAKWPKARGIYIEDKANGTAVIEMLKNELSGIIAVNPEGGKEVRANAVAPIWEAGNVYLPHPLVCPWVDDFINELVAFPNAEHDDDVDSMTQILNKMIGKVSLRERYLDN

SEQ ID NO: 6350 - protein, 464 aa, Enterococcus faecalis
MGNIANEAKLLKLDGKAYRNDFMLGNGKGHARDNLSRQRPGTSKRLSCSQLESLYSSNSMAKNIVDIPAEDLTRNGWSLKMQDDKVKALYESKLRQLKAKERLQQLFTYERLYGDGFVSIGTIEKREYSLSEPLDFENIKSVPYINAFSGKKISNRIIDEDVFSPNYGQIESFEVNNRSNNSRIHLLNNTTYSRATTIHRSRVLHQQNLRFEDELEGSSLLENLYDILTVADTSVWSVGQILYDFIFKVYKSADVRSLTPQDKLEIETKMDYQFRTEAIAIIDKEESLGKESSSVAGIGELLDFVWDYLAGAARMPKTVLKGQEGGTVTGAQYDVMNYYSRITAIQENQLRPHLEYLMRCLMWAEDECGGRLDPDSIEWSVEFNPLWNVDSKTDAEIRKLTAETDKIYIEAGVSDPDDVHEARFGRFGITETSKFNADSLSRDELDKMAAVVYENYKQDRDNEK

SEQ ID NO: 6351 - protein, 396 aa, Enterococcus faecalis
FMKITNRTEIMKNNPKTRYPLRLEESYAKNIQKAVKEIEKVSLYEFDKYLAPMIDDKNIVNDSNLINDGLFDAASKLIRNAQTYFLGILQNRTAQKIVRKHINSVNAFNKSNVNSQLSARGINPLQTEKWLDSYVQAKIAENISYVTNIRDDYSKKFEQVIYRGITEGKSSNEIREELVHQAGMSSDKAAFIARDQTGTILGQMNSERQKRAGFQAFRWSDSGDERVRDSHRERNGKIYFYADNPLLPGEEYNCRCVAEPVDDEELLEESIDLGLSNQEEHAVKTYVSSEAYKLNDKLRNGYQLDESDLKLIDNLDKALGKMTNYDGEVTRSMFFDSSDDLVRFANNYNLNDVVQFPEYISTTKDIYSEQDSLRFVIMSSTGKDLGSYNTLFTTGW

SEQ ID NO: 6352 - protein, 302 aa, Enterococcus faecalis
  MISC_FEATURE (243)..(243): Amino acid 243 is Xaa wherein Xaa = any amino acid.
SVWKGFGKHDSSARVETGGPWFNQTQFHLNTRLEQAFQPIEIDNTQFYLLPYFEPIAARLYFEDETIRTIQAAMEKVVAKMQESFLPNKKQVLVSHFFVAGSEKTDSETKLTVGGLDVVPTALLEPFDYVALGHLHGKNALQAPNARYSGSPVKFSLSEMTQEKGVWLVETEAEVHFQFRALKPLRDIQQLTGSFQQLTDPAFYQEVNRENYLHVQLTDRAIIPNMMNQLRKIYPKIIGLERXNGRETSSGNQKKVVQIEQRSPEEHLHDFFNDVTGEALTEQQAQWVQEELSTLNQLERRK

SEQ ID NO: 6353 - protein, 89 aa, Enterococcus faecalis
KTSDRILMKPWILRSVKDSSLFLISGKTGSGKTTIFDGMSYALFGESSGKLRIGKEMRSTFADPSEATEITLLFKHNEYLYELNRLPEQ

SEQ ID NO: 6354 - protein, 103 aa, Enterococcus faecalis
  MISC_FEATURE (94)..(94): Amino acid 94 is Xaa wherein Xaa = any amino acid.
LFKKRGTGVRKQSAKISLIVKDAQGKELLSYSKRREVDELIQELLHLNANQFAQIVLLPQGEFRTYLIATSDEEKEVLRNLFGTELYQLFSEYXKERLRIANH

SEQ ID NO: 6355 - protein, 818 aa, Enterococcus faecalis
HFLKNFNYLESQQQEAHQQLLVEREQIATLKQAKQAKEQVRYAIEERQNLQQQKEELLEKKAKQAEQETVIERLKEQIQQLKWSQKQQSLAEKVFEKRSEKQQKEQETKSKQQALMETQQALTDWQAIMSELEEQQPLIAEKQERLQTIQRQLPQYQEYEQLAQQQIAEQANYQAIQKEYESCQQEKITLADKVATAKQFIEQEGTLEKANFECSSVADHWQNFVERWQKNQKAWQKISQNQGELHELTQRFAVEQQQKSAEEAKLQTKKSQWASLQIQRLSLLLEEGEPCPVCGSLEHPKQQTHQEVSLEEIDQAERELTEVEKTVQRFTETLSALGAEKQQKESQLQEQEAAYTEEQEQLAAQFADLQLPLTGLTFSQVTPAEIAEVESQLAKEKQQIAQKLTEISVEKDHLAELEEQVAENSQRFEVLRQQVETMQQSLERITIQQQMIASQLLDATVTYEEMTKQQTLLQEELSAFERQKENVTTQGETLKKEEMILESTLTHLEKEQQTLQQTVAQLESQLNAVLTEQGVTEDQLTEWLKEVPTLESQQEQIALFEQEQTQLTIQLAEIEKKLSSDTFPELSLITTEIEQITQQIEEQEKKYYQLHEKMQNNQQLVQEINAQRTTIEDKFEEVAALQQLADTVNGNNPKKISFERYMLQTYLERVLTVANQRLDRLTNSRYQFELNHEAGSYRNQTGLEINIYDDNSGTVRSAHTLSGGESFIAALALALSLAEVIQEQAGGVLIDALFIDEGFGSLDEEALEMAMEALETIENEGRMIGIISHIGELKARIPQQLQIKSNGNGQSTVHYQLA

SEQ ID NO: 6356 - protein, 1073 aa, Enterococcus faecalis
LSRRGGESMKWSIPERIVEQGREYMQEGRVLSIVQNPEKRIWLSEVLGEELYLVELDGTAKEQDVCECQYWMEHGYCKHTVAVELALKQRGVSRIIQANQTVSFEKTNRSTAEMFTKGFAKLSKASAEVPLQPLRLEFHLDVIETNNYYPELSTIGLSLKIGLEGTKPKTYIVKNIGDFLQAYEKEMTFMVNKQHQFTLLHDSFSMEIQEILTELAAIYHTSQLLGANGIQVKGKIDKRYLLLPIDRSQSLVEKMNRTGQFILTNQTHKYRYLTFKETSLPLTFTVQKTEEQSFKLTIQNPITTFLAHYHWAIADQTVYLLTEEQEAIYTTLLQLMKRLEEPSIIYEKETVSDLFSEVLPLLEKIGRVSVEESVEELVVHHPLKAVFIFKKIKGRINARIDYHYGEVIFSTNPKYAQLPEVNQEIVRDKAKETAIKQQFQQFAYQQTTTGFEKVLPAGESLYYFFKAEVPAFRQLGEVRMGRKLRELYLDAQHHQPTIEVAEGDSWLDIRFDVTGIDETEIDAVLTSLLRNDAFYTLKSGEILAFDSEEFFHTSAILTKLRKNMHQEDNVIHVPKNQGLMIESLLEDNERAHFSDSFKKMVTDLTHPENFEAQVPKTLQATLRHYQETGYKWLKMLSHYQFGGILADEMGLGKTLQTITYLLSEKEEERLKGTALIVAPASLTYNWLAEVKRFAPTLNVQVVSGNRQERAALLQNSTEDILITSYASMRQDVQLYQEMRVGYLILDEAQMVKNSGTKTAQALKSLKVPQRFALSGTPIENNLDELWSIFQMILPGLFPGKKAFREIKPEEIAKMIQPFILRRDKKTVLADLPEKIENNMYSVLTEEQKTVYLAYLKQMQADVSQMDQATFKKNRMSILAGLTRLRQICCDPRLFIEDYTGGSGKVEQVKDFLVAAKENNRRVLLFSQFTSMLSILEKELNELGLETFYLRGSTKPQDRLTMANAFNEGEKDVFLISLKAGGTGLNLTGADTVILYDLWWNPAVEEQAAGRAHRMGQKKVVEVWRMIAEGTVEEKMNSLQQEKRELFQKVIQGNEEQLAKMTEEDIRTILSIGE

SEQ ID NO: 6357 - protein, 319 aa, Enterococcus faecalis
LLSYLKRNGVIRLKQKEYMEYRPLGEEIERIRKGKNIPLRVFDENGVSSRSYQRFVQGNSELRISDLAIIVEILSISPMEMTEKLTPMSKTVLAKEQFNQAIFSKNFQESSRIVADYRAYYEKSSFALGKQEVMYSMLALEYLFNPQTVVTKEEIIALENQILERLINADVYTIFNLKFLALQKNVGLQPFPTSLLFRVLQSVNEREIIDIRSLEIIEQVIIDFLFAAIVSQNVPHILHVLSMFKEYEVGENNWRMILWKKIAEKIEMILTNEEIFADWSIFKEQILLSITLFLPKAKQEFFAGQLEKIEDSLKEIKEN

SEQ ID NO: 6358 - protein, 77 aa, Enterococcus faecalis
KWVQLRQTVQINLYRQDKERQIGFSTPIWRSLSLNTTRMYYDKFSIMPSFLLFLLNYPLFFPIAQQKILVWLLVKTM

SEQ ID NO: 6359 - protein, 732 aa, Enterococcus faecalis
LRKYQEVKFMKKMCISAVSALLLANSLLLPVTTFAETTETIASSSEENVSSVSEEKIPETSSAEEQNSATSSSEIPQSEELTTVETSEEPPNEALAITEAQLMMPQLYAGAVLDKATPISTLFPDPAFAENIRKQLSKSRISNTVTQAELDKLNKVILENVVVSNVEGVQYLRNLEELSFQDSLNVTDLSPFAKGEFKLLRFLYMRNNKIADLSPLGQAGLINLEGLYVENNQLTTLNGLEGMAALKNLSIQNTTDHPSKITPNNRVTSFDPLRSLRNLETIWAANNQIATLDGLTEANNLLRLYVENNQLKTIAPLANKPRLEELSIMNQTIASLEALSTVPNLRVLYARNNQISSLSPLEKTLNLTVLDVGENQISDISPLKGLTAITGLDVSNQMIILSSVDYIAGKPLQLKNKVVSRDGQLFPPLTISPYGSYDATKGLFEWNLPKAHEGVSYIWESTDKAYLGNFSGTVVQPVKEVFLSETKLSWSKERIEKSMEKTIDIDDFQKTALPFYWQDVDAGNRLQFIVKKEGQEIQKLADETTTNSKTFKEKALLLPELTYGKQQLVVEVYDKGYKIDELALTVTVVGSVRFKTVPTAISFGNELQIASSTTQYPIVSMDQPLVIRDTRQTGNNWSLALTVTSDFKSESGATLPNILKFRTNHRLQDIPEGQSILVHNQANGHQETNISDQWKENDQELLLSVPGGTAKAEEYEAKLTWHLMDVPDGSAK

SEQ ID NO: 6360 - protein, 123 aa, Enterococcus faecalis
GVSLIKKIVSGVLLLGLISSVDVFAETNAYPTNAEVSFYGEYEPPANKEKPDGKIPQRFPKQSEAIPAVSGESLKHSTSKTVDQKGSGFLPRTGTKQQQMFNYLGIIVIFMASFILKKRKKEQ

SEQ ID NO: 6361 - protein, 268 aa, Enterococcus faecalis
KKERRNNKMKKIILATIPAITLGVAIAPEVNAEEKNYESNAIVEFTPDASINKPVDPVNPDTEKPVEPFDPTTPDTGNKPNEGTTGPLSIDYASSLDFGKNKISNKDEKYYANPQYFFLADGSGPDLTNPKPNYVQISDKRGTNAGWALTVKQETQLTATKETLNKVLDGSEIKLSQNKAVSNSKAVTPTAHEVTLVAGDSSNVMSAAEGQGSGTWLSAFGGIEKVEVDGESVDKNTAITLTVPGATPKDAVQYKTVLTWTIADLPSV

SEQ ID NO: 6362 - protein, 264 aa, Enterococcus faecalis
KRRSTNMKKMTIASSLILATIAVGTLPVQAEEVANRDTDAIEKFKAPDEKDPNSKNPVVDPEDKDGKDPVTPIDPVNPDKPVDEGYTGPLTLDYASSLNFGENIISTKDEIYFASAQVLKDKNNVEKTGPLFAQITDNRGTLEGWTLSAKQNSAFTSATKGLTLEGTEIVFQNASAVTAGQSAAPTSLASVTFGTVGESHNVMVAATDQGAGKWSYLYGNASSIAEVDGRQVMKDVQLKVPGKSVKLNDAYKTTITWTLANTPV

SEQ ID NO: 6363 - protein, 343 aa, Enterococcus faecalis
SEMKNRYFILMILSFYFFAFGIETSAAELRFSVETEIPENQIDKTKTYFDLMMKPDQEQILKVRAANSTDENLVIDVSVKSATTNSNGVIEYGESLTALDKSAPADLSEIIQLKDGGESVELPAKSEKAVELRVKMPKEEFSGQLAGGITFSEKVDETKDKQKENTNGLAIENRYAYTVAVLLRENETVVQPELSLEKVEPTQRNARSVISATLLNHEAAYLQSMKVTANVKNKKTNNVILEKEQEDMQMAPNSIFNFPIPYEENEMEAGTYVLAMTVEGSGKKWQFTKEFTISKEEAKTFNEKDVTVKKTESKLIYLLIGLLILLLIICLFIILRLKKQKNK

SEQ ID NO: 6364 - protein, 237 aa, Enterococcus faecalis
MRTIVFDVDDTLYDQQQPFRNAMTKIFPNVATEDMHELYLRFRHHSDETFPKVLANEWSLDFMRFFRMNETLKDLNYPGISQEEGKIFQQVYEEELDNITMHPEVTKLLDTLQEKEIPMGIITNGPTDHQFKKVKQLNIEKWVPSQNIIISQSTGFQKPEKEIFDLACNQFCMEPEHTLYVGDSYDNDIVGARNGGWHSLWFNHRSRELPSCQPASHLAEVTCFTELCPTVEKLFNL

SEQ ID NO: 6365 - protein, 71 aa, Enterococcus faecalis
ITHVLIEVRILQETVFFRIMNENEGGELGSYVKAFFWVLSAVSSIIYFGFWVCRFCGAVRVGFSSSSQPSN

SEQ ID NO: 6366 - protein, 573 aa, Enterococcus faecalis
GVMLKRFFGYYRPYRRLFILDFGCAVFAGLLELAFPVAVNQVIDKIMPKGDFRLIALASAGLFAFYIINTFLQFIVVYFGHMLGVNIETDMREELYQHLQTQPFEYYDNQKTGKLMSRLTTDLFEISEVAHHGPEDVFITIMTLAGSFLLMLTIHVKLAIATFILLPFITIALGYFNKKMTKANTDIYDNLGEFNAGIEASVSGIRVTQSFANEPFERKQFNYLNQMYRKSKLYFYKVMGVSSAYNYLLIRLINLFSLIFGAYYTIKGEITEGQFVGFILLANIFIRPIEKVNNMIESYPKGFAGFKRFTEEMDKQPSIKDLPGAVAVSHLEGTIAYKDVSFAYEDGTKVLDHINLKIQPGETVAFVGQSGSGKTTLCNLLPRFYEVSSGEITIDGRNIQKMTLASLRKQIGIVQQDVFLFPGTLRENIAYGNLNATEIDIQQAVKLAHLEHVIQLMPDGLDTIIGERGVKLSGGQKQRVAIARMFLKNPPILILDEATSALDTETEQVIQESLNSLADGRTTLIIAHRLATIKHADRIIVVSDQGILEDGTHETLYAQRGHYRRLYDAQFRT

SEQ ID NO: 6367 - protein, 232 aa, Enterococcus faecalis
WTNLVDLSQKDGRAGVSAGLLTYPPLMVGDIVLYNADLVPVGDDQKQHLELTRDFVERFNKRYAQKNQEILTIPEVKIAEQGSRIMSLQEPTKKMSKSDTNVKGFISMLDEPAVIRKKIRSAVTDSTGVIEYNKEEKPGITNLLNIYSAATGQTVEELVQAYEGKGYGDFKADLAEAVVALLEPIQVRYQELLASEELDMILDEGAENARLVANKTLQRMKNAVGLGRKVRR

SEQ ID NO: 6368 - protein, 98 aa, Enterococcus faecalis
GERSNDVYRKLALYSQDDNKKVTAEYEITVPKLIVSSENFNIVHGTVKGDIEVKANGFTLNGTKVNGNITFDKQEYKDSADLEKDGATVTGEVTVANN

SEQ ID NO: 6369 - protein, 214 aa, Enterococcus faecalis
MQFLKKYGGYFLVLGVLLDFFTPYYVGFKDQGYNQLTEVISLLGDVNSPVRENFNRLTIIAGMLMLASLPRIYAIFSRKTKKGAWLVVAMIGAYGLFDCIFSGLFSVDTSSAGTVAAALHNGGSAVGYTGFLLLSGVLTIIYSKYGSQKNKNLFGFLFILCMLAAGLYGLARIPQLQQVKPFNYLGLWQRVSSFCNYLPMLALCLQTKTNDKFD

SEQ ID NO: 6370 - protein, 64 aa, Enterococcus faecalis
KNQVRPLKLKNSRHIFLKTASIHLNFDFLFTLSIAYQKFQIIKLSFPLKNFSSTRDEKFYFRIQ

SEQ ID NO: 6371 - protein, 248 aa, Enterococcus faecalis
RDFKNSAIEKYLNSVLKDLSPERFLNQWTQALFSLGTLTKNVSSFFLNAFLTLIISIYALVFKQSILTFVEKAAHKLLSEKVYKQTQTWLNTTNKIFYKFISCQFLDACIIGVSSTILLSILNVKFAVTLGILLGICNMIPYFGSIFASIVAGVITLFTGGVTQAITVLLVLLILQQIDGNIIGPRIMGDALNVNPILIIVSITIGGAYFGVLGMFLAVPVAAIIKIIVSEWLNESKENDKIVDSIES

SEQ ID NO: 6372 - protein, 147 aa, Enterococcus faecalis
LKKYNVDWNYWVVRFLFVMALIVGYLLITNYQHFVHSVSGLLGILSPFITGFVIAYLLSGSQKKIEGLLERVPLPVVKKAKHGLSVLLLYLIILFIFVLTLNYIVPLLISNLVDLANSLPTFYDHMVQFVMSLEDKGILKTARLKNI

SEQ ID NO: 6373 - protein, 71 aa, Enterococcus faecalis
LGMLQETLRLVFLQQVPIKISLWITLRSQWNQKNKFSLSKQLGLQVKRTCSPSCFFYEKKQGLVPHFYTAE

SEQ ID NO: 6374 - protein, 1359 aa, Enterococcus faecalis
FRDGRSKNKRIYFWNAPLIVNNESVFKNVRGLIYQMKHGKIKRFSTLTLLASATILVPLSTSAEETTNSSTETSSSMVEPTATEEKLWQSDFPGGKTGEWQDVIGKTNRELAGESLAISRDAAAGNNAVSLNLDSPKLADGEVETKFKYTAGSGRTGVIIRGNTKDSWVFVGYNANGKWLVESPNSWNDSISGPTLNEDTNYLLKVRYVGEKITIWLNTTLIYEGEPVLANGDKIPTEAGHVGVRLWYDKKIVNYDYFKNGPVDSIPEIVPEVTQIAPVKVFTKIGVAPKLPKQVKVTYNTGKEANEAVRWNEIDPDAYKEPGTFEVDGTLENTNIKAKASIVVAKDNEAEKGDKISSADLTAVVDPQFPRIIRYEDPQSNQVIFNGQHEKIDQVMIDGKAYKATAEKQKSEANQAVYNVAVPEIGLRFTTTLTVSEGQELAMKLSDIREEGTKIHTISIPNQGLISVNSTDEGATFAGVVMNTGTNANNGNKNGDTIQDLTTTSQEETKKYMYGFLNTANYAASFWTNAYGDGSVDGSDNNRIHKQTKEAATGFVTTLSSGAWTYRPFDAPEDYTTGETPEVKVKFSKDSNDDNRVDWQDAAIGFRSIMNNPMGAEKVPELVNQRIPFNFASQATNPFLVTLDESKRIYNLTDGLGQMNLLKGYQNEGHDSAHPDYGAIGQRPGGEQALNQLIDEGHKLNAVFGVHINDTESYPEAKGFNEELVDPTKRGWDWLDPSYFIKQRPDTLSGRRYERFKELKQKAPNLDYIYVDVWGNQGESGWASRQLSKEINSLGWFTTNEFPNALEYDSVWNHWSAEKDYGGTTTKGFNSTIVRFIRNHQKDTWIISDNPLLGGAEFEAYEGWVGKTNFNTYRQKTFAINVPTKFLQHYQITNWETTTAADGQIYGTIKLANGAEKVTVTQADANSPRSITLNETEVLKGDAYLLPWNVNGQDKLYHWNPKGGTSTWSLDKKMQGKTNLHLYELTDQGRIDKGAIATTNNQVTIQAEANTPYVIAEPDSIEPMTFGTGTPFKDPGFNEANTLKNNWKVFRGDGEVKKDANGDYVFSSEKERTEIKQDINLPKPGKYSLYLNTETHDRKATVTVKIGGKKYTRTVNNSVAQNYIQADINHTSRKNPQYMQNMRIDFEIPDNAKKGSVTLAVDKGNSVTKFDDLRIVERQTDIMNPDKQTVIKQDFEDTQAVGLYPFVKGSAGGVEDPRIHLSERNEPYTQYGWNGNLVSDVLEGNWSLKAHKQGAGLMLQTIPQNIKFEPNKKYTVQFDYQTDGENVFTAGTINGELKNNNDFKPVGELTSTAADGQTKHYEAEIIGDASGNTTFGIFTTGADKDFIMDNFTVTVESKK

SEQ ID NO: 6375 - protein, 140 aa, Enterococcus faecalis
DRRKSMSEHLVLVSHGRFCEELKKSAEMIMGPQETISTVALLPEEGEADFLEKFEAITESLEDFVVFADLLGGTPCNILSKKIMQGASFDLYTGMNLPMVISYVNASLLAIEGDYVKESAESIVKVNELLLNVAVDDEDE

SEQ ID NO: 6376 - protein, 63 aa, Enterococcus faecalis
SSPHFFSIPRKNGHDLLKLNVHSSIFSCLTYFEITPNADNATQTINTIKMALVDVIFFLPSIQ

SEQ ID NO: 6377 - protein, 291 aa, Enterococcus faecalis
FRVGQQPKKNMQRMIQTKERLKMTKSNYKLTKEDFKQINRRSLFTFQLGWNYERMQGSGYLYTILPQLRKIYGDDTPELKEVMKTHTQFFNTSNFFNTIITGIDLAIEEKEGIAGKQTVSGLKTGLMGPFAAIGDSIFAALIPTIFGALAANMAINGNPTGIFIWIVAQIAVMVFRWKQLEFAYREGISLVTTMQHRLTALTDAATLLGVFMVGALVATMVNVKLSWAPSIGDVTLNMQNNLDMILPRLLPAGIVGGVYWMLGKKNMTSTKAIFIVLIVCVALSALGVISK

SEQ ID NO: 6378 - protein, 306 aa, Enterococcus faecalis
QNRREQKMNILWWQILLLTLYAGYQILDELQIYSSLSAPVFAGLFAGLVMGDIKAGLIIGGSMQLTVLGVGTFGGASKIDANSGTILATAFSVSLGMNPEQAIAAIAVPVASLMIQLDILARFANTYFAHRIDKMVEDMNYKGIERNFLMGALPWSLSRMIPVFLALAFGGGLVQKVVSVLNGDLKWLGDGLSVAGAVLPAVGFAILLRYLPVKKHFPYLILGFTVTALLGTIFTNMQLLGTSVASVVKDFSGVFNALPMLAVALIGFALAAISYKNGQMIPSGPAAKKEHAANDSDEGEIEDDEI

SEQ ID NO: 6379 - protein, 166 aa, Enterococcus faecalis
RNERGITMSIIGVRIDGRLIHGQVANLWATKLNISRIMVVDDEVAGNAIEKSGLKLATPAGVKLSVLPVEKAAQNILAGKYDSQRLLIVVRKPDRLLKLVELGVPIKEINVGNMSQTNETRSITKSINVVDQDIEVFKELNAKGVHLIAQMVPSDKAEDFMSLITK

SEQ ID NO: 6380 - protein, 616 aa, Enterococcus faecalis
IKSFLYLAIIQQLKAFTRKGDNVDRFEIKEEFLLNGQSFKILSGAIHYFRVDPSDWHHSLYNLKALGFNTVETYVPWNLHEPQKGTFHFEGILDLERFLKLAQELGLYAIVRPSPYICAEWEFGGFPAWLLNEPGRMRSNNPTYLKHVAEYYDVLMEKIVPHQLANGGNILMIQIENEYGSFGEEKAYLRAIRDLMIARGVTAPFFTSDGPWRATLRAGSMIEDDILVTGNFGSKAKENFGMMQAFFEEHGKKWPLMCMEFWDGWFNRWKEPIIKRDPQELAESVREALALGSINLYMFHGGTNFGFMNGCSARGTIDLPQITSYDYDAPLDEQGNPTEKYFALQKMLHEEYPALPQAEPLVKESFAQTAIPLTNKVSLFATLETISQPVVSVYPQTMEQLGQNTGYLLYRTSIEKDAAEEKLRVIDGRDRLQLFVNQVHQATQYQTEIGEDIYVTLPQENNQIDILMENMGRVNYGHKLFADTQKKGIRTGVMADLHFMTQWQQYCLPMTSCEQVDYSREWQPDQPSFYQYHVELAEVKDTFIDVSKFGKGIVFVNQTNLGRFWNVGPTLSLYIPKGLLKEGQNEIVIFETEGTYQPEIQLVKEPLYKEMKEGLQ

SEQ ID NO: 6381 - protein, 318 aa, Enterococcus faecalis
LGGIAVIVTVTMNPSIDISYLLDHLKLDTVNRTSQVTKTPGGKGLNVTRVIHDLGGDVIATGVLGGFHGAFIANELKKANIPQAFTSIKEETRDSIAILHEGNQTEILEAGPTVSPEEISNFLENFDQLIKQAEIVTISGSLAKGLPSDFYQELVQKAHAQEVKVLLDTSGDSLRQVLQGPWKPYLIKPNLEELEGLLGQDFSENPLAAVQTALTKPMFAGIEWIVISLGKDGAIAKHHDQFYRVKIPTIQAKNPVGSGDATIAGLAYGLAKDAPAAELLKWGMAAGMANAQERMTGHVDVENVKKHLMNIQVVEIAK

SEQ ID NO: 6382 - protein, 345 aa, Enterococcus faecalis
RFMTINNTTFGGGTMLTLTAGKKAAMDRLSTQEGIISALAIDQRGALKKMIKALDVEPTDAQIETFKELVSKELTPYASAILLDPEYGLPAAKARDTEAGLLLAYEKTGYDATTPGRLPDLLADWSVLRLKEEGADAIKFLLYYDVDEDPEINHQKHVFIERLGSECAEEDLPFYLELVSYDAQIADATSLEYAKVKPHKVNEMMKEFSKPQYKVDVLKVEVPVNMNFVEGFAPAETAYTKEEAANYFLEQSQATDLPFIFLSAGVSTELFQETLRFAKEAGSTFNGVLCGRATWKNGVKPFVEAGETAACDWLKTEGRENIESLNEVIAATASSWHAKVQVNEG

SEQ ID NO: 6383 - protein, 395 aa, Enterococcus faecalis
LGELSMFTAEKEELEQLGAEITTREIRQQPELWQETVTLYHENQTALENFLKEVQAKAQGKRTRVIFTGAGTSQYVGDTVVPYLRAHGDTQAFSFESIGTTDIVAKPEDYLIKDEPTLLVSFARSGNSPESLAAVEVANQVVETIHHLAITCAEEGQLAQISQKEENSFLFLMPTRSNDGGFAMTGSFSCMTLGTLLLFDQTAFEQKQDYVTALIKLGEEVLSREEELNEIVNLDFERIVYVGSGSLAGLTREAQLKILELTAGKVATIFDSSMGFRHGPKSFINEKTIMFGFVNNTPYTRDYDLDILEEVHGDEIAAGVFAIAQPGKRNFSGSTIEYSAETALLPDGYLALADIMVAQTVALLTSIKVGNKPDTPSPTGTVNRVVKGVTIYDYK

SEQ ID NO: 6384 - protein, 251 aa, Enterococcus faecalis
PVRVKEKVMENAFKNKALYHQLVDLLQERIETCMIPHDKLPSERELTAQYGVSRTTVRLALQELENRGSIYRRHGKGTFVSDIKKEAADLAGAYSFTEQMKGLGRKPHTRILSFEKLEADKFICQHLNLSLGEAVFKLSRLRIADNEPLMVEDTYLPVKFFLSLTDQLLRSKPLYDLFSEDFKQTVRLADEELYASIASKEDAKLLMIPEGAPVLHLARQTYNMKNEIIEFTLSVARADQFHYQIRHIRNS

SEQ ID NO: 6385 - protein, 303 aa, Enterococcus faecalis
VQEMENRKELAIVSCCNTNFVPHLAAMFVSILENSPSAAAVHFYVIDDNINFESKQLLYFTIKHTQINAELTFLKINPHFFKNVVTSERIPKTAYYRIAIPELFRGSQIERLLYMDCDMIALDDVAKLWTVDLGENIIAAVEDAGFHQRLEKMAIPAESMCYFNSGLLLIDVKKWLNLDVTTKVLRFIEENPDKLRFHDQDALNAVLHDRWTLLHPKWNAQGYILSKAKKHPTIYGEKQYEETRRAPSIIHFTGHVKPWTKEFQWYTKRYYDQYANRTAFRCVNTFNQYLSYTKISRRIEYAQ

SEQ ID NO: 6386 - protein, 287 aa, Enterococcus faecalis
KRRVVLMRKNQKIVPIVTASDENYAPYLNVMMTTVLENCHAERPVHFYVIDDGLSLSSKKALRETVSSNSQNATVEFLTADKEVYQNFLVSDHITTTAYLRISLPSLLQKYSYKKVLYLDADTLVLDDIVQLYDTPLVNQTIGAVIDPGQAYALKRLGIHSSDYYFNSGVMIIDIDRWNEKAITQKTIQYLEENGDRIVYHDQDALNAVLYEDWLALEPRWNMQTSLVFNRHEAPNVAYQKLYTAGNQEPAIIHFTGHDKPWNTLENHPYTALYLNKLKKVGARNGK

SEQ ID NO: 6387 - protein, 165 aa, Enterococcus faecalis
RQKHTQEDFYMTQVHFTLKSEEIQSIIEYSVKDDVSKNILTTVFNQLMENQRTEYIQAKEYERTENRQSQRNGYYERSFTTRVGTLELKVPRTRDGHFSPTVFERYQRNEKALMASMLEMYVSGVSTRKVSKIVEELCGKSVYKSFVSSLTEQLERLYKPLITTS

SEQ ID NO: 6388 - protein, 159 aa, Enterococcus faecalis
MKQQYTATVVMATYNGEKNILEQLDSLKNQSKKIDEVLIWDDCSTDSTVKIIENFISENKLGETWHLQINTENLGWRKNFFNLLNAATKEIVFTCDQDDIWDASKIEVMCEAFANTDVKVLVSDYTELVEPGGLAEELKKIDSVKLPNQKAECSPRVRP

SEQ ID NO: 6389 - protein, 278 aa, Enterococcus faecalis
ESNIMQKLTLKEVQAKAVEILVYIDNICRSNNLHYTLFYGTLIGVERHKGFIPWDDDIDIVMPRPDYELLIKILKNDSNYQLLSFETRKHFRYPFAKLVDPNTVAHSKQYFGGEDKDLGVFVDIFPIDGIPDTQKERNELRKITEQYRLNLMDTLGLSYARSFHLSKALIKLITRYPNHFKVKKVGNNQYWRDLYQTEAKKTPFGATKHCGYLEWIHIDWGVFPNEWFLEYEDVEFEGHKFMAIKNRKQFLTLRYGDYMEMPPVEERITHHPYDFYQK

SEQ ID NO: 6390 - protein, 79 aa, Enterococcus faecalis
FSCYLKCLTLVTFLFSVRIKNYMDFVLDNQIVLVILISGLLITEVILTRRFATVIFWLYLGKIQYRTDMENDLIRGNEQ

SEQ ID NO: 6391 - protein, 415 aa, Enterococcus faecalis
LEDMMIINLSQQMQKIEKRIAIPYIVFFELVLICRMVSIYSTLPTKIDSLFTLIIMLLSGVYFICHFLPIFIEKKQRRIEYWLIAFIGILFLTTFINHTYAFSENIKLIIWQCIFFFSVYEVGRSNDKSVFKAFEYVLLIVWTALVIVGLYLFFARISFSKPVESLYYGMRIGFFENRLYGVFVEPNYACTISLVCILVGVRNFINTNSKWLKVVCAMVIFLQFSYVALSGSRSGVIQLISMVIFGMFFTIWFFQKNTSKAVIKKVVQAVLVSFFCGAIVFGGLQLIKKGYIATANSVNIEVPKVLDNKENDILGNKKITTKRPDVEGTDDISNSRFALWQSAIDLMKLNPIFGTSPKGFADIAKDKLPQSHIAKTAQTPHSFFFHLLAATGISGTIVFLIFLLSKMFNSGNIPV

SEQ ID NO: 6392 - protein, 330 aa, Enterococcus faecalis
KVAEIDMPKISIIVPVYNVEKYLEKCVRSILAQTFTDFELILVDDGSPDSSGAMCDQFAEQDQRVKVIHKENGGLSDARNAGIEIATGEYLGFVDSDDYIADDMYELLYTNIVKEDADLSICGIYDVYEGKEPIVKSLIQGTFSREEALLLILQGNIISVHAVNKLYKRKLFADLRYPKGKYHEDSFIIVDLLSECQKVSIDSTQKYYYYHRMGSINTETFSDKQFEFIEAWEKNELKLKGKGAVIEEAAHQRVCFANFLVLDKILISNAPKKKETKQIVRYLRENFIFIMKNKVFTKSRKLSMILLMFGLPFYKIPIKLKRKYIEKTID

SEQ ID NO: 6393 - protein, 89 aa, Enterococcus faecalis
YFLVKLTIMLLLWKKFPVLNFLQLALSPHRHHKYHRLINRHLLLRYLYIIVHTYHLQCNHHYLRNLNTHLLLFQFQHYEHRLAHHFLYG

SEQ ID NO: 6394 - protein, 356 aa, Enterococcus faecalis
WRDTMLFTDDNYLSDVERVLEKTPDWTKVTNKSVFITGASGMIGTFLIDVLMYQNKTRNANISIWAMGRTLSRLEERFTSYLEDPLFHIVIGDVTEEIQIAEACDYVLHCASNTHPKSYASDPIGTIMTNIAGTQHILDYAVKANSEKVLFLSTVEIYGENRGDLDKFTEDYCGYIDCNTLRAGYPEGKRASESLCQAYIQKYGIDVVIPRISRTFGPTMLLSDSKASSQFIMNAVHKENIVLKSAGTQLYSYAYVADIVSALLFLLVKGQKGEAYNVSNEHCDITLRTFAETLANVAGTKVIHGEATVQEKQGFSKATKALLDNQKIYALGWRPLYDSMEEPLKHTIKILEGSGN

SEQ ID NO: 6395 - protein, 216 aa, Enterococcus faecalis
LVRERILYQMITALIIAGGVGKRMGQEIPKQFIMVEEKPIIIYTLESFQKHPLIDRILVVCKKGWEQTLDAYAKEYHIDKLQWIIPGGNSGQESINNGVNFLKEHSNPEDTIVIHDGIRPLVDELVLSDVIVKCQEYGNAVTSLPYNEQIFVKETEETTRQYINRETLRRVSTPQAYKFEKLTWAYEKAFRENIGISESSYTNTMMVDLGETLHFA

SEQ ID NO: 6396 - protein, 201 aa, Enterococcus faecalis
MILLQKLCKLTLVTKGDLNELFRSHLEKAINTLLRTELTAFLDYEKYDRTGFNSGNSRNGSYFRSIKTEYGELTLEIPRDRNGEFKQQTLPAYKRTNDTLETTIIHLFEKGVTMSEIADLIEKMYGHHYTPQTMSNMTKVLTEEVNAFKSRALNDKYVAIFMDATYIPLKRQTVSKEAIYIAIGIREDGTKRITELCDCSN

SEQ ID NO: 6397 - protein, 223 aa, Enterococcus faecalis
NVKPYPKKRFILPLVYEKTALKELLSYAIAPTESTYVWNELLQDINSRGVQEVLLFITDGLKGMKDTIHQIYPKAKYQHCCIHVSRNIAHKVRVKDRKEICDDFKAVYQANSKEEANTFLSGMIEKWKKNYPKVTQSLIENQDLLTFYDFPPSIRRTIYSTNLIESFNKQIKRYSRRKEQFQNEESLERFLVSIFDTYNQKFLNRSHKGFQQVTDTLVSMFTE

SEQ ID NO: 6398 - protein, 125 aa, Enterococcus faecalis
ITLFAVQKMEQIASRFIGRDDREVFFVMCLNTRNNVVAVLRCHVGSLNASLVHPREVFKSAILNNAASVIVAHQHPSDDITPSKEDINVTKRLVEAGKLLDIEVLDHLVVNSDNGFTSLKERGYI

SEQ ID NO: 6399 - protein, 110 aa, Enterococcus faecalis
FVQPFCQRGQSLHKMLLQKKQEMIASMTDVDRRQQEIDDTYDYKVPALNKIREDKLEMCFRKLFPDVKSDMEHLEKILFTVNEPSMHSDFEYGQAIVDLKEKAYIKNYKD

SEQ ID NO: 6400 - protein, 71 aa, Enterococcus faecalis
IMQEIEIGKIYYCEVPSLEGSFEVQVLQMLKDNCVLVRVVRCTLMQSKYLKKNKYRFIVNIKSLKGRSLHF

SEQ ID NO: 6401 - protein, 209 aa, Enterococcus faecalis
WQMYLAYLRVSSDDQSLARQHKLIENWSVKNNIAEDDLKIFEEKVSGKNIENRPELQELISFIRERDTIIIPSLDRLARNSKDTKDLLQLFRSKGASIEILDLPSFNGVTDPALRDLLTNLVIEVFSYVAENERKKIKERQKQGIEIAKKNGRYTGKKIQYHANATGKNKLIYDEIVDGLKKKETISKIAKNAGVTRKTVYRVKRDLGM

SEQ ID NO: 6402 - protein, 170 aa, Enterococcus faecalis
MKLNSINDLFAIIGVIANILFSCLNFRFTQKNKKNKLSIEQMKKDIETDLKNDHKERRKIEEYTSLMEKCKATDAIFSFLRKSDEIITRENIDLENEISKLESIFSDINSLKYLIVEENSDSFLEFEKYLTDLIDNRNNELMRQNIARFLTKLVSEWKSIISQNMDKLRY

SEQ ID NO: 6403 - protein, 119 aa, Enterococcus faecalis
NQGIIGNPSLNHRYRKGFYSLFKTLQQNHSIDNYYIQFKGFDFNSSTEFKLALYAQFFIEKLNRFQEIVEDSDFNTFNSHKPMRGTYIKFLENYNDLKSTNNYQFGNLSYEMISKVLSL

SEQ ID NO: 6404 - protein, 234 aa, Enterococcus faecalis
KKIAGGMTMNHFKGKQFQQDVIIVAVGYYLRYNLSYREVQEILYDRGINVSHTTIYRWVQEYGKLLYQIWKKKNKKSFYSWKMDETYIKIKGKWHYLYRAIDADGLTLDIWLRKKRDTQAAYAFLKRLVKQFDEPKVVVTDKAPSITSAFKKLKEYGFYQGTEHRTIKYLNNLIEQDHRPVKRRNKFYRSLRTASTTIKGMEAIRGLYKKTRKEGTLFGFSVCTEIKVLLGIPA

SEQ ID NO: 6405 - protein, 81 aa, Enterococcus faecalis
PWATIFVITLAIVKFKKSYMIVALTFLIRRFIVGCKNMANYSIKFGKRKIKNPFIHGKWMKRTSKLKENGIICIEPSMQMV

SEQ ID NO: 6406 - protein, 76 aa, Enterococcus faecalis
CYCRKFVAVWQIQLKERGAYGLISLSDVLCRKEMPDLFSLDQIIAIIGAAAVVITAVAKASDSILAWLKFKKEQKK

SEQ ID NO: 6407 - protein, 234 aa, Enterococcus faecalis; identical to SEQ ID NO: 6404

SEQ ID NO: 6408 - protein, 81 aa, Enterococcus faecalis; identical to SEQ ID NO: 6405

SEQ ID NO: 6409 - protein, 234 aa, Enterococcus faecalis
IFIRSKTFKFLTSLFFRAILGIIKCQKLMFRKGEGKLAIYGYSRVSTSNQDYKTQIRKLEEAGAEKIFSEKYTGTKKEGRKELEELLSIVKVGDKVLVTKIDRLARSIVDLNSIISTLNHEGVTISFLDDHLTFEPDKKDSMQTLMMNMLGSFAQFERDLIVTRTQEGKQWHRANNKNYREGRPKRVLNDKYKHALEIMETNSMREVERKTGISLSTLKRIKKQAKEEQLLNEK

SEQ ID NO: 6410 - protein, 136 aa, Enterococcus faecalis
WKQTACEKWKGKQVFLYLLSNESRNKQRKNSYLMRNNSGVVIMENREKIIQLFKNPLVTGYGIEIMSNGRLYSANFQRYKNRAKKEENPLIIFESMTEKVEQVFLELAEEVIRTNPKTKQEFNEMIREYSYKENSK

SEQ ID NO: 6411 - protein, 70 aa, Enterococcus faecalis
QMIARKKYDHFGIEIGMWNRDNVVNKIECDCGQRANKVRGKHEFFECADCGRCYHKELGEYVPLENSNKG

SEQ ID NO: 6412 - protein, 81 aa, Enterococcus faecalis
KRKKEKVMKNNQMEIKLKEIMDKQGMTIDELKRNVQIDPVLLDGMYNEGLFDDTKVGVQTISELMIALNISKINELVPKVK

SEQ ID NO: 6413 - protein, 67 aa, Enterococcus faecalis
NVEGQLSKAKLIIRLFGFDHVPGIKNYSYLNRNIFIISACRSPFNHVKANVKTPSLHNYRSIFVKMA

SEQ ID NO: 6414 - protein, 91 aa, Enterococcus faecalis
DEKKGGLNMKKNILEEYRATKNKGEDFLHWLLVRKLNTFGKVVIAIILWLLWLKYAFNLVFMVNFLKVIVLITIIYWLADIYLRVKNKLKK

SEQ ID NO: 6415 - protein, 205 aa, Enterococcus faecalis
LERTVFCMKFDYSKEPRRDVLCIDVKSFYASVECVERGLDPLKTMLIVMSGADNAGGLVLAASPMAKKVLGISNVTRKDEVPDHPELLIVPPRMNLYMKRNSEINNLLKRFVADEDHSVFSVDESFIDITASLKYFNCDTAYRLAKIIQRVIYNHMGLYVTIGIGDNPLLAKLALYNEAKNTPGFVAEWRYEDVHRKSLVYLPYH

SEQ ID NO: 6416 - protein, 275 aa, Enterococcus faecalis
QSWPYITKQKIHQVLLQNGDMKMYTEKVWSISPITEFCGIGNRMAARLKMSGIESIYDLAQADPYLLKHRFGVMGLQLFAHAWGIDRSFLGEKSQVAKEKSFGNSQVLPRDYARKDQIELVLKELSDQVATRLRNSNCQTECVSIFVGYSKGQVDGLGRSHWRKQLKIARSNNTKVLTEHVLKLFRENYVPGMDIRNLGVSFGKLVWDTTLQIDLFSPPEEQIINNQLDFLIDKIRQKFGFKALIHASSLLEGATAVNRSGLVGGHAGGNVGLGG

SEQ ID NO: 6417 - protein, 73 aa, Enterococcus faecalis
QMKKTKKEFTPYNDYVDRPFDLKWPTAFPLGELQAAIKETDEFNAREIERLPQQSQVQIEYLLERSIKQNKAA

SEQ ID NO: 6418 - protein, 80 aa, Enterococcus faecalis
ITNRKDGLLKYTIAGILSVIIMFGAVIFVFFGKKPVEESVHTSTETTVKSSTEISESSTVSSTATTESSTEITSVSSDES

SEQ ID NO: 6419 - protein, 180 aa, Enterococcus faecalis
NRKWRRMIMHQVYVDIIVDAIIEQYQTEENFYSAYQIQAADWQAWKEGQFGLDNEVMQKIKNLFTDYEWMLTQKILRQTILFPEKRNLAVSEYKRLKTTIAKKWLQSDLGVVELIPNNKQEQEIAAGYIDLKVTLAYGEWGFDDIITFRLPATIQRQLEGSKVELLDWVNENLMDTYVGE

SEQ ID NO: 6420 - protein, 322 aa, Enterococcus faecalis
GLLLTKKLYQWGIVGLGGIAHEFASTFKQETSQLAAVASRTLSKAEQFAADYSIPKAYGSYEELLADETIDVVYIAVPNKQHAEHILKALQAGKHVLCEKAITMNAAELKQALAVAEKNDLILAEAMTIFNMPLYDELRRLMDAGKFGQLKMIQAPFGSYKEPDPKNRFFNPDLAGGALLDIGTYAVSFARWFLSSQPDVLASSMVPFSTGVDEQSVTLLRNKENELATISLTFQAKMPKQGIVAFEDAYITITDYPRADEAIVHYNDGTVETIVSGYSAEAMNYEIYNMVEAIKGTQPNRSLFFTTEVIDILDQMQKLWQN

SEQ ID NO: 6421 - protein, 451 aa, Enterococcus faecalis
EMNGETNVEQIQIIDSNKHVGETVKIGAWIANKRSSGKIAFLQLRDGTAFFQGVVFKPNFIEAFGEEAGTEKFQEIKHLSQETAVMVTGVIKEDSRSKFGYEMDITDLEVVGASEDYPITPKEHGTDFLMDHRHLWLRSSKQHAIMLVRNEIIRATYEFFNEQGFIKIDSPILTGSAPEGTTELFETDYFGQPAFLSQTGQLYAEAGAMAFGKVFTFGPTFRAEKSKTRRHLTEFWMIEPEMAYTTHEESLDIQEAYVKHLIKSVLKNQQYPLDVLERDTALLEKYVSEPFKRITYDDAIELLQKEEANNDYDHIEWGEDFGSPHETFISNYYGVPTFILNYPKAIKAFYMKPHPTREDVVICADLIAPEGYGEIIGGSERATDYDYLKEKVAEFGLSEEEYSWYLDLRKYGSVPHSGFGLGLERAVTFITGNEHIREAIPFPRMLNRIYP

SEQ ID NO: 6422 - protein, 399 aa, Enterococcus faecalis
MNVSNRAQQLTPSVTLAAAAKAKALKAKGVDVLSLTVGEPDFVTPKNIQKAAIASIEDGRASYYTPSGGIPELKQAIVSYVEREYQLRYQPKQVIVTDGAKYALYLLFQAILNVGDEVIIPVPYWVSYGEQVKLAEGKPVFVSSTQEQSFKVSVAQLEAVRTDKTKAIILNSPSNPTGVIYTEEELRQIGEWAVAHNILIIADDIYGRLVYNGHRFTPIATISEAIRQQTIIINGVSKTYAMTGWRIGFAVGDEKIIQAMTQLASQSTSNPVAVSQYAAIEALTGEQSTVEDMRQAFEKRLNHIYPKVAALPGVSLIKPEGAFYLFPNVKKTLEICGYDNVTNWVEDLLQEAHVALVTGEGFGAPEHVRMSYATDLMTLEKAIERMNDFIEKKRIQHNA

SEQ ID NO: 6423 - protein, 179 aa, Enterococcus faecalis
DPVSLERMEGFLEELEEKKEKKRITVLLTLLAILLAILVTIIIFFVRTNQPMAQAKKEATAIAKTSANLETVDKFYWFTRKNTYFTLTGKNDKGTEIVVIVPKSGEKVTVLNQKDGQTEQQITDIVAKAHPDESVMKATLGLYDKRPAWEVVTENDQGVLTYYLMSFDKGEEINVVKDI

SEQ ID NO: 6424 - protein, 929 aa, Enterococcus faecalis
MKGVKSLKDKQVYAVVDLETTGTDPTSDRIIQFGCVLVQDGKIIANFATDVNPNQVVPKQIQSLTGISNTQVQKAPYFEDVAHTIYHYLEDTIFVAHNVHFDYNFLARELVRCGTPPLTIPAIDTVELAQIFLPTEKSFRLSDLSESLGLSHENPHQADSDAQVTAELLLLIQEKMKSLPLVTMEKIAELSQQTARETSAFIQQTYEQMKKQVTPLNPAYQVVSGIALRKKEVPLFEETFYQTSTYPKTKKAKEKLFGERFAYRAEQSRMMNLVYDHFTEGTTKDLFIEAATGTGKTLGYLLPMSYLATPEKPVIISTVSIVLQNQLVEKDLPLANQICQGKLRGIVIKSHRHYLDLQCFKATLNQPTPQKQYALYQMGVLVWLLETETGDLDELQLTNLNHLFWKEVTHRGLDFLSKKDELYEVDFLRHLYKKVAQSNVLIVNHAFLAQESLRKQPLLPESPWLIIDEAHHLPDIASRMASERVNSVILKKQVTHFIEKEQLFVALQQIFQQFSEEQRFVKIYQQGLLDFVDEWQDFLFELHRLFSKTQKRIDHQELLLTKERIDYLSAAGEKHSQTLQLLLQELLTIQSKLQQTIMSQLETFSLADRIVFVRLFQFFDEIERIHHCFTIYLDDWRPRWVKEYLPQNEDHGLIEIHDLEASLLPETKWYPRYERIIYTSGTLKFGNNKKYLPQRLGLTEVTFKTLPTPYNYAENARVYVPEEAVAIQNASSYEMGQYISDTIEKLMAQEERSMLVLFTSHELLSTVYHQVQPRLLEKGQEVLAQGISGSREKILKRFSNGKPNVLLGADSFWEGVDLPGTALQLLIVTRLPFENPKRPLVQAKYAYLEAEGIQPFAQEAVPKAALRLRQALGRLIRSEEDRGALLILDRRLVTAKYGKRLIKAFPKGLSVKEAPMPEILEELKEFLNK

SEQ ID NO: 6425 - protein, 465 aa, Enterococcus faecalis
ENQKNFSCILKVSIIKKWLLTEKKEVNLMTKTLETQPEEKTVFLCKETNPDFLGREIYADNVETPYNFYLIRKLYLAKEYQNLAEGEQFFEALCESWDESEQFEELIVKKIYVYVETELMYYTVYFGSFEPTTRDLRSALKQWMYEIPTTKNKKTVRMNETNVQVVPQENQLTELAGEIAVLREMLTLLKENLASLNEAVNQTRNPVISRQIKTIHLKRASPVIAAEQASLKVSEDTNLEQPDVNLSPDNRENQEGETTVATSEPAPIKEALPEKKQENQQSTAAKPLFTFPQETEKSSLNSVNKSAEKEEEQKPEKEAVSMESEKENSSSRTIPADFQRQLDELEEEIYRRFMSRHLEDTDGNQAVPKITIEKRQLEAQMFEAKAFSQSFKQVQKKKAGDVRICNQLSCMKLEKGLDKFLDEVTEYVEKRTLFNKKVRCPLPVIRELEGYGQLNQYMQKILDCY

SEQ ID NO: 6426 - protein, 499 aa, Enterococcus faecalis
MKSFIFFNKKGIGYMDKKQLRWFTVGLIAFNMVWGLGNVVNNYAQQGISVVTSWLLILVLYFIPYALIVGQLGSTFKDSNGGVSSWVQNTSTKRLAYYAAWTYWVVHIPYLAQKPQAILIALGWAVQGNGNLVNTMPIVTVSFISLIIFLVFLLLSTKGLTTLKVIGGLAGTAMFVMSILFILLAVGAPFINSTVEFATPNMSQVSTYIPKFDFSYFTTVSMLVFAVGGAEKISPYVNATKNPAKEFPKGMIFLAAMVGLSAVLGSFAMGMLFSSDNIPKDLMANGAYSAFQKLGAYYGVGNLLMIVYALTNTVGQVAALAFSIDAPLKILLAEADPEFVPSWLRKRTKKGTLINGYLLTGILVSIIIALPMFGLKDMNEVVKWLTNLNSVVMPMRYLWVFFAYMLLNKAYKQFNSEYKFVKNPKIGFVFGLWCFLFTAFACILGMVPKFEYASDPQGWLFQLASNIVTPIVLILLGMILPAIARREKKDTILPIDSAE

SEQ ID NO: 6427 - protein, 1456 aa, Enterococcus faecalis
KEVHFVTEKARDLFDKLMTQIQLDDTAKEHPLIQNGRIDKVIVHQQSRLWEFHLSFDELMPVMLYQTFMQQLELAFQQIAQVSVQITTNQTTFTEEQLTDYWQLALLNSQCNTPLVQKVLKTQTPQFEDRKIILPVDNEAVIPYLKQQYLPIIEELYFSYGFPKFHIEPKMDQQQAAEVLKKFEEQKLEQAAAFQQQAAESLVKHEQMKKEKQQQAPAFDGPIRLGRNIPNDEPIMPMGNILEEERRITIEGFIFDKEVRELRSKRKILILKITDYTSSFVVKKFSNGEKDEQVFDAIQPQSWIRVRGSVQEDTFMRDLVMNAQDLMEVAHAPRKDYAPEGEKRVELHMHSNMSTMDATNKVGDLVAQAGKWGHKAIAITDHGGAQAFPDAHAAGKKAGVKILYGVEANIVDDGVPIAYNEEHIELTDATYVVFDVETTGLSAVYDTIIELAAVKMHKGNVIETFEQFIDPGHPLSQTTINLTGITDEMVRGSKSEEEVLRMFKEFSEGTILVAHNASFDMGFLNTSYGKHGIPEAANPVIDTLELSRFLYPHFKSHRLNTLSKKFGVNLEQHHRAIYDSESTGHLCWIFLKEAKENHDMHFHDDLNRHIGEGDSYKRARPFHATILATTQAGLKNLFKLISMSNVDYFFRVPRIPRSQLSKLREGLLIGSACSNGEIFEAMMQKGVEEAKNRAKFYDYIEVMPKPVYAPLIEQELVKNEADLEEIISNLVKIGDELGKLVVATGNVHYLNEEDAIYRKILVGSMGGANPLNRHSLPKVHFRTTDEMLTEFQFLGQDIAKRIVVENPNKVADLCEEVIPVKDDLYTPKIPGSEQEITDLSYNRARELYGDPLPEIVEKRLEKELNSINGNGFSVIYLISQKLVHKSNEDGYLVGSRGSVGSSFVATMTGITEVNPLAPHYYCPECQYSEFYEDGSYGSGFDMPEKACPKCGARLFKDGHDIPFETFLGFHGDKVPDIDLNFSGDYQAEAHNYTKVLFGEEYVYRAGTIGTVADKTAYGFVKGYERDHNLHLRGAEIDRLAKGSTGVKRTTGQHPGGIIVIPDYMDVYDFTPIQYPADDQEAEWKTTHFDFHSIHDNILKLDILGHDDPTVIRMLQDLSGIEPKTIPTDDPEVMRIFEGPDVLGVDAEQIYSKTGTLGIPEFGTRFVRGMLEQTHPSTFAELLQISGLSHGTDVWLGNAEELIRRGEANLAEVIGCRDDIMVYLIHAGLDSGMAFKIMETVRKGQWNKIPDELRDTYLNAMKENNVPDWYIDSCSKIKYMFPKAHAAAYVLMALRVAYFKVYFPILYYCAFFSVRADDFDLVAMSQGKEAVKARMKEITDKGMDASTKEKNLLTVLELCNEMLERGYKFGMIDLYKSDAENFVIEGDTLIAPFRAVPSLGLNVAKAIVAAREEQPFLSKEDLATRGKVSKTLIEYMNENGVLKDLPDENQLSLFDML

SEQ ID NO: 6428 - protein, 137 aa, Enterococcus faecalis
EILMAIKKMKSGSYKVEVFYPKEVREILGVTSQRYRKTFSSKNEALVAEKDILKKIEKVQLEKHERAFELKANISFKEFYEQVWLDMYCNGSSGRNRMIPSEQTILNTKDLFRLHILPMFGSYSLFELNTNKDLVLR

SEQ ID NO: 6429 - protein, 90 aa, Enterococcus faecalis
MNELTILLSDTQKQRLQEAIHKLLENEITQFQIDLGLNNRYLKKHQLCQYLNLSNNTIDKLITVGLPRISINGIVLYDKLEIDNWLKKYA

SEQ ID NO: 6430 - protein, 279 aa, Enterococcus faecalis
LRLLHGYNQKIIETPTYIEIWEYEQLILTKRKTDNDEKKEKPDWLKTTKQTFDDLTAQGQYDSLKRKQKHYKNQRFVVARLIDMNLDNQTKFLTLTFKKNITDIAYTNSEFKKFMNRLNYHLYKTKKAQIKYLATWEKQKHGAIHYHVILFSFPYLPHAELTAIWGHGLIKINKIDIDSAENRGRYVSKYFDKDLELKEHKKKAFFKSQNLKHPLEIKRLTDRPYEVKDQKVLFTNNYVSKRPVFFQDWNEQNIPNKEIGFEEQNVRYTKIKKNGGTHK

SEQ ID NO: 6431 - protein, 174 aa, Enterococcus faecalis
SHTSSKQMTDYFTAHDVLKKVEGLNSLCTLNKWANFIQKECDYQFHYDYIRFASHTRTKRTINHRKTRMFSLEEIQKFQKVIKLIPILGRNTSLRKLFDKKHHLDTMNHSELLTEIINQIEVKLANKEELFQALTKKYQQLERSYQTLEQRLAQLEESLSTQEQTSSGWFRRKR

SEQ ID NO: 6432 - protein, 112 aa, Enterococcus faecalis
GYEMAVKINDLTLPKEKLENEYQVVQVSLWQKDGEALGWTYECVLPKLRFEKISVKVKSEAPVITKETLDEKGMAIVRFDNLMITPWGRVNGQFVSYGLTATAYKATLVPNK

SEQ ID NO: 6433 - protein, 297 aa, Enterococcus faecalis
CIICYDCFDKNWLLTIEEIELYETKQKKVGERIREIRTNLGYSMDEFGSLLGDSPRSSVNNWEKGVSIPKRDKLEKIAILGNMLPDQILYGRADEYLYDLIDSSFNVKFSDNILYEIFESVPPEKRSYDDLMWLAVAKYFIDNGTYGKVVGKFNYISMLGIPNLYTGSYQNEFIEQREDYKQQEVKYYVYADPEKNILHIMPFVPNEKNIELLYEFPELLEQQADHEVFTANFEQIGLTLKGSTIVYYGIDKQKLEAKTQAYKYDEAVDLYRIAQLPETLSMFDDEIQKQISFLKSK

SEQ ID NO: 6434 - protein, 127 aa, Enterococcus faecalis
TWYSIIILDCCSYRHGFCKIAGGNLMTSEKENKELLTKKNQPIKIITQQDINALEITLEQLQSWTSTLEILNKFFDFEQETINKKKIIRKYHANAQIFKIFLNDFLQRTESLEKQLENLKRREKVRI

SEQ ID NO: 6435 - protein, 76 aa, Enterococcus faecalis
MNENEGGRKVEVLINDLLAERQMSLRELARLSGIEPSNLSNLANGKRQKIYLEHIERIADALEIDDISRILKLNRK

SEQ ID NO: 6436 - protein, 403 aa, Enterococcus faecalis
RQPIHRKEDFPMNDFTTEIVQTLVTKGDLNELFRSHLEKAINTLLRTELTAFLDYEKYDRTGFNSGNSRNGSYFRSIKTEYGELTLEIPRDRNGEFKQQTLPAYKRTNDTLETTIIHLFEKGVTMSEIADLIEKMYGHHYTPQTMSNMTKVLTEEVNAFKSRALNDKYVAIFMDATYIPLKRQTVSKEAIYIAIGIREDGTKEVLSYAIAPTESTYVWNELLQDINSRGVQEFLLFITDGLKGMKDTIHQIYPKAKYQHCCIHVSRNIAHKVRVKDRKEICDDFKAVYQANSKEEANTFLSGMIEKWKKNYPKVTQSLIENQDLLTFYDFPPSIRRTIYSTNLIESFNKQIKRYSRRKEQFQNEESLERFLVSIFDTYNQKFLNRSHKGFQQVTDTLVSMFTE

SEQ ID NO: 6437 - protein, 820 aa, Enterococcus faecalis
MKNDNTLSEEGIDTDKGIVGSIFESMLSDTLSEIKNLDNVKIQKIVENIGKYDKKEFLQRLAALRIPFENRDKAVLLDATTTATLNWLSENNWNFNGLSMSYGKFKKVIQQINQLDSKMAIDPLDNPYIDNIQFYGNHKVMPGINFASSYNLQMMIQSIFLSNRTKLSDEKNRYISILLNDNLMVSTDVCKKCQIPNELPSFTREIFIPNKTKLESYMKLVLLVKKLPGIHEISIMKEDVDLEKQKPFSQNQHLFLTKPYLDTGEGVLILDITSVANALSSKIATIISEVYVFEEMWNDIRKSFKRLKHEKIAENNFAIKLLDERKYKEAIFNIANDKLLIAFGIFGGIEENIDYTEKITSRVELIVEKLNKHNIMNNQLFIIIIVHTLGGSVYISLKLSNIYRNIPMAYFNAMELRAISQVETDDIFLPRFMKAKMQLSEPGLLGAFGEGDFIPAIMFSENDLSFYVADDIDYREMNIHIGIEDTSDYYLKAQKKYRECLFYSTFDRNWYTSTKEEFSNRYLVNYTSGQRFQCFIETRNGKIIEVITEKFESSGEIDILFNSFDLVSYWLEQYFSINELSENHVIYLRIEEILEKYYLVDEVNTEEPAINISKTENIIIWNITSPIYQKIGMAKTSSYERKLISELIDTLETSDLDTLDRIFYPEYKKKMTGLLIDDNGKLRVPTHGFQLLKISEYETNQLLDELGEYLKGQGYVYGAIPKKDNLQFCNKIVGFLYSILEREANVFNKNQLLKLLIAQIETLLPVQLRGESSYNNDIALSVQEKDRFFEQLNEDNRNSIATKFLLQYVVASPITGEQNV

SEQ ID NO: 6438 - protein, 356 aa, Enterococcus faecalis
IFVQSNRIGIKKKDFKNVNSAMLASRNLQLANSNLPISENRRYVERVNQLFKSKLDSAFVEAFGYSYEEFNLVIGGLIDTHNNLEKIVWIEEEEELVRKIFNDLDKKISEIKIVSVLNSIALVEREKYLTPPIGFEKLDIFPWRFNRRLSFIRRPLVKYENKYMFGIRNVIHAHKYLMRLIWGGCLKTNSRKMKDVMSKLRNILGDEFNDRVKSILETYPNLQVMKGVSKIGKKRISGENNNTLGDIDVFAINRKQKKLFVIETKDFSFSRNPYELAMEQEKVFIGDKAFLNKHLKRSDWIRKNLKYVIDNYDLEDGKWEIVTMFVVSEHLITKDLVDTKGVKFISLKELDYNMFH

SEQ ID NO: 6439 - protein, 144 aa, Enterococcus faecalis
IRGLKYMKKEIRVVGAIIVEKGKVLCCQRGPERALANLWEFPGGKIENGETEVQALERELQEELKIEVTIVKEEYAFCRYEYDFGFVNLTTFICYLESGEPQLTEHLQIKWLTPNELNQLEWAPADIPTVEKLVEKGVGTEQNG

SEQ ID NO: 6440 - protein, 181 aa, Enterococcus faecalis
KKVWELNKMDNLELALQKAFINKETLGDELTPKFIVNNPKKHDYLLNTLSKDLKSCKTFFIAVAFITPSGLNAIKTQLADLALRGISGKILTSTYLNFNDPHVFRALLNIPNVEVRVSKKEGFHSKGYLFEMEDYQSFVIGSSNLTMSALKLNYEWNVRLTSRENGEMVSSYSKASHSRMA

SEQ ID NO: 6441 - protein, 740 aa, Enterococcus faecalis
  MISC_FEATURE (11)..(11): Amino acid 11 is Xaa wherein Xaa = any amino acid.
LQERMARWFLXIQKHLIQEWHEAQSLTLEWVDAFEKNYHPIVNRKMLVQDVSENECLDTQYILPNSMQKEALRSLKALRETGATKGMIVSATGTGKTYLAAFDVQQFHPKRVLFIVHSELILMKALESFKLILGGKDDDYGVLSGNSKNFDAKYLFGTIQTVSKSEYQERLGKEAFDYILIDEVHKAGAKSYIKAIEFFNPKFLLGMTATPERTDNFNIFELFDYNVAYEIRLQAALEAELLCPFYYFGVTDYEKDGEIIDETTDLKRLLQKERVDFLIKKINYYGYSGDSPRGLVFCSRKDEARQLAEMFNDRGIPSAYLSGDHNFDKREKEIKRLDTGEIHYIFTVDIFNEGIDIPKVNQVIMLRNTQSSIIFIQQLGRGLRKDPSKEFVTVIDFIGNYKNNYMIPMALSGDSSQTKNSLRRDTIDVTYISGLSSINFEKVARERIFKSIDQAKLDAMSELKASYFKLKNRLNRVPYLNDFQVLDGVDPLLIIGKEKTYYNFLERIGETEAKLSEEENGALKFVSVELLSGIRPHELYVIEEFLMTDKEQLSLEEITALFDTFNLTYTTDTLASVVKVLDLSFYESTIRKRYLLSQMFKMKENCLQITEKFREFKKNSYFINLMLDVIHTGINKSMEYDLSQPLNLYKKYRRKDVLRLLNMNFNQNEQSIGGYTNSNNHFAIFVTLDKGKDFKAARIAYEDEFIDERTFNGIQKRLEIYARQKFNFCGILGNINFIYL

SEQ ID NO: 6442 - protein, 98 aa, Enterococcus faecalis
TNIQWYTKAPRNLRSPEVQLLRNPGEYKFHLFVKRKYNQKENETDFYYLGEVAPLQETIQQVEKQDKEGKKKSVVKLDFTLETPVEPNMYEFLTQNTN

SEQ ID NO: 6443 - protein, 778 aa, Enterococcus faecalis
PVQQPPRTDVYRQYIGSQGSAQKAIEQCKAAMLYPPLGMPLLIHGASGVGKSFLAKLIYEYLKNEQIIGLEKFYTFNCADYANNPELLSSILFGHTKGAFTGAESEKQGLLAQANNSVLFLDEVHRLSNENQEKLFQFMDTGTFRPIGEEGKMVHSKVRLLFATTENPKKVLLPTFYRRISVIVSLPNFKERPIRERIAILKNLFHREAKRMTKDINVDEDIFTALLENEDPGNVGSLSHKVHPLCASQLQLNLAHPTGLLGECTQPMIAIPLNKKVLEEYTLSSDIFATFEALFTKEKTLAHLKTELTQFIKYCLDDEITLENDYFLQNLVTEVQTKNKLIINQPEQTEKPMKDVAKLLKILPPTFNETVLLPVQTQLKEHYPRTVSLVKNLVSPLPEEYRFLTEVLLSVLLSGEISETIPYQALLVAHGESTATSIQAVANKLCGTYIFDAINMPLTSSVRDIVAEVKEWLSQRDTSQGVIMLVDMGSLTQLYKSLKPQILGELLVINNLTTAYALEIGHQLMNEQLFYGIAKTAEKKFKTDVQYFEGFSVEKNIIVSSISGLDIAKQIKQICQKYLYTDIKVITLKYKDLVNTLDIANAEENYLKETSLILTTSYLDNHTNVASVNLLDMLDEDAGTQLMEPFQNLMHPNNIDSMINEFVHFFSKEGLSEKLEFLNPDVIIKQVENVTKNIEKRFDLTLSGKMKFNLMMHNALMVERTMLGVEDYEIPANLEELTINQKPFFQNAKNIFYTLEQFYRIEISNWELYVIYEILSSR

SEQ ID NO: 6444 - protein, 78 aa, Enterococcus faecalis
IMRLETYQHLVDILETSNTPMSTQEIATKIQLSRSVTSLYLNKLLEKGEVQQTGKKPVYWQLTRATTPTNRCVSTIHR

SEQ ID NO: 6445 - protein, 288 aa, Enterococcus faecalis
RQRERNRRGGLFRMKLKENLSKEEKKMMRSVFWRSWTMNASRTGATQYHAVGVMYTLLPVINRFYKTKEERAEALVRHTTWFNATMHINNFIMGLVASMEKQNSEDENFDASSITAVKASLMGPLSGIGDSFFWGILRVIAAGIGISLASTGSPLGAIVFLLLYNVPAFLIHYYALYSGYSIGESFIQKMYESGGMKILTKVSSMLGLMMMGSMTASNVKFKTILEVSVKGSKDVVKIQDYLDQLFVGIVPLAVTLLAFWLLRKKVNVNVVMFGIMFLGILLGLLGIC

SEQ ID NO: 6446 - protein, 272 aa, Enterococcus faecalis
TMLMHATMAALAVFICFAGNYLTGQSMMERPLVVGLVTGILMGDMKTGVLMGASLEAIFLGNVNIGGVIAAEPVTATTLATTFAIISNVEQKAAMTLAVPIGMLAAFVVMFLKNVFMNIFAPSLDKAAREGNQKMVVTLHYGTWIIYYLIIASISFIGILAGSGPVNLFVRSIPQNLMNGLSAAGGLLPAVGFAMLMKLLWDNKLAVFYILGFVLTAYLQLPAVAVAVIGTVICVVSAQRDVEFRDILKRKPAASSAVEGSAKEIEEEDFFA

SEQ ID NO: 6447 - protein, 167 aa, Enterococcus faecalis
EEIKMITQVRVDDRLIHGQVAVVWTKELNAPLLVVANDEAPKNEVMQMTLKMAVPNGMKLLIRSVDDAIDVFNDPRGKDKRIFVIVNSVADATKIAKNVTDIESVNVANAGRFDKSDPATKTMVFPSVQLNPEELEAAKELASLTHVESYNQVLPTNSKLSLKQAVN

SEQ ID NO: 6448 - protein, 171 aa, Enterococcus faecalis
TVSRALKPFQIKDLEFSFFGTELALYKSEVKRMKRKFLIASHGNLAKGFQSSLDILADKGKELAVINAYVTPEDYTPIIQTFLQSLGAEEQAIILTDLYGGSVNQKIVQEVMTTKPDNVFIISNANLAIALSLIFLKEGEKLTKEDIQAAIAEAQIQFVELNPSNEEENFF

SEQ ID NO: 6449 - protein, 315 aa, Enterococcus faecalis
GELRMTDALVIQDLRKVYASGVEALRGIDLTVEEGDFYALLGPNGAGKSTTIGIVTSLVNKTSGKVKIFGYDLDTEMVRAKQQIGLVPQEFNFNPFETVQQIVVNQAGYYGVSRKEAMKRSEKYLKQSNLWEKRNERARMLSGGMKRRLMIARALMHEPKLLILDEPTAGVDIELRREMWAFLQELNAQGTTIILTTHYLEEAEMLCRNIGIIQSGELIENTSMKHLLAKLQFETFIFDLAPYTQAPVIEGYQSVFEDELTLAVEVERNQGVNHLFEQLSQQGIKVLSMRNKSNRLEELFLKITEDTYQREDQHV

SEQ ID NO: 6450 - protein, 274 aa, Enterococcus faecalis
  MISC_FEATURE (263)..(273): Amino acids 263, 272 & 273 are Xaa wherein Xaa = any amino acid.
RLPRIRTKGRINMFSLYFTALKSLAVKETNRYLRIWVQTLVPPVITTSLYFVIFGKMIGGRIGDMGGFSYMEFIVPGLIMMSAITSSYANVSSSFFSQKFQKNIEEILVAPVPTHVIIWGFVIGGVGRSILVGALVTIISLFFVPLHVVSWLMVIMTLLMTAILFSLAGLLNGIFAQSYDDVSIVPTFVLQPLTYLGGVFYAISMLPPFWQAVSKVNPIVYMISGFRYGFLGVQDVPIGIFMTILILFIVGSYGICSSYRALXTPSFGPRMXXP

SEQ ID NO: 6451 - protein, 710 aa, Enterococcus faecalis
TISEIEVQEMYSIIVNGQSETCETNKKLMDFLREDLGLTGTKDGCNQGSCGACTVLVNGKASKACLFTLEKLAGKEVTTIEGLSQRQKDVYAYAFAKTGAVQCGYCIPGMVISAQGLLNKKPEPTKEDIQKAIRGNICRCTGYVKIIEAIQLAAKMFCEEASIPEEHSNGKLGEDFQRVDAVEKTLGTGIYVDDIDIEGMLHASALRSAYPRAKVLSIDSTQALAHPDCVAVFTAKDVPGNNKIGHLEFISDWDVMIPEGEITRYVGDAVALVVSKRKETLPEIKILVEVDYEEMIPLTSCEAALAEGAPAIHEKGNILSHEHLVRGNAEEVLEIFAFVVTGHYSVPINEHAFMEPECAIAQPEGEGILFFSAGQSIYDEQREVARMLGLDKEKIHVQSKLVGGGFGGKEDMSVQHHASLAAWLLKKPVKVLLSREESLMVHPKRHGMEMDFTTGCDEEGNLTAMKAVIYADTGAYASLGGPVLQRACTHAAGPYKYQTIDVEGFAVYTNNPPAGAFRGFGVCQTAFAIESNLNLLAEKVGLSPWEIRFKNAVAPGDTLPNGQLVSKNAALKEALLAVKDVYEQAEVAGISSFFKNSGVGVGLPDTGRCIISVEEGKIHVRTSAACIGQGMATVTTQIACETLNLPPEMIVAEAPDTRRTPNSGTTTASRQSLFTGEATRRAAMQLRYELDMGRALSDLEGEKFYGEYSA

SEQ ID NO: 6452 - protein, 345 aa, Enterococcus faecalis
RTGCSIGGTEMREVFQRLKQAILEKQDTMLLTIGTSSGSTPRSQGARMLVSAEGRIAGTVGGGAVEFQAEQVAKKLVLEKENAQRQFILAPNNIADLGMVCGGNVTIFFHYLSWETPFLKELCESIETHFQNNQQGWLVTELDQNNLGKVSFYSETGELIGSTSWEGELSLLPKGIHCEQKEDIIFLTEAILQVGKVYIFGSGHVARALVPILNYLSFYCVVVDDRPEFLTAQAFPQAEELRVIPLENLAAFIEITADDYGIVITRGHNFDFIVAKQLLETPAKYIGVMGSKHKIASQVRRLKEVGYTMTEIERIFMPIGLDIAAETPEELAISIAGELIQQRYQ

SEQ ID NO: 6453 - protein, 128 aa, Enterococcus faecalis
KNERIKEEKMFTYSLNLKLKTDRNFFGPGVVEVLQKIQQTGSLNLAAKKMKMSYNKAWRIVRVAEEELSFPLIIKSVGGCNGGGSIVTDQGKELIDQYLLFEKKVYQQVEACFEEIFKEQDVVSEELK

SEQ ID NO: 6454 - protein, 446 aa, Enterococcus faecalis
KEEGNDPMNEKKEQALFEYDAKLSISEAIPMGLQHVVAAVVGIVTPGIMIAKVCQLSPSDTTILIQTSLIFSAVATLIQLFPIFGKVGSRLPVMMGASFAYVPILMAIGADFGIAAIFGSQLVGSILVIIVGLFIKKIRVLFPPLVTGTVILSIGLSLFPVAIKYMAGGAGSADFGSARNWLVALLTFAIVFYFNYFAKGFLKLSAILNGMVIGYLISLALGMVSFEPVQNAKIVQVITPFHFGLDFQLVPIFTLVVMFIVDAVQAIGQFTATTVGAMDRDATDEELSGGIMGSGFTNFIGSLFGSIPVATFGQNVGLVTVTKVINKYVLVFASVILLIAGFVPKVAALLTTIPYAVIGGATISVFASISMTGIRMIASQEMTPRNTGVVGTALAFGIGVTLSTGSLAGFPTWVTTIFGNSEVILTTLVAVLLNVILKPKKRVALE

SEQ ID NO: 6455 - protein, 134 aa, Enterococcus faecalis
RIIEWRKTMTNKMINSAQAPATVGPYSHSVLAGNTLYISGQLGLDPQSGEMKTTVEEQAKQAFINLGSILKEVEMTYDNVVKTTVFLQHMSDFSKINEIYGNYFSEVLPARSCVEVAKLPKDGLFEIEAVAVKG

SEQ ID NO: 6456 - protein, 317 aa, Enterococcus faecalis
GEAMGKRVVVALGGNALGNNLTEQMTAVKQTSKAIADLIEAGYEVILSHGNGPQVGMIQLAMEEFSFNNPQYPVVPLSMCVAMSQSYIGYDLENALQEELRQRNISKAVTTVVTQVVVDENDPAFKKPTKPIGRFMTKEEAEQLVKEKNIQVMEDAGRGYRQVVASPKPKNIVELLTIQTLVDAGQTVIAGGGGGIPVIQEGNRLKGVNAVIDKDFCSERLAEQVDADLLVILTAVEKVCINFGKENQEALGNVSTEKMKQYAQEGQFAPGSMLPKVEAAIKFAESKPGRKTLITLLEKAKEGLSGKTGTLIENKES

SEQ ID NO: 6457 - protein, 428 aa, Enterococcus faecalis
FGSLCSRLCGITNGLLWLSKGLLDKKKGADGMETFKEYIEKLDKLEFEKMYENDFFLTWEKTRDELEAVFTVADTLRYLRENNISTKIFDSGLGISLFRDNSTRTRFSFASACNLLGLEVQDLDEGKSQISHGETVRETANMISFMADIIGIRDDMYIGKGNAYMHEVSESVQEGYKDGVLEQRPTLVNLQCDIDHPTQAMADALHLIHEFGGIENLKGKKVAMTWAYSPSYGKPLSVPQGIVGLMTRLGMDVVLAHPEGYEIMPEVEEVAKKNAAEFGGNFTKTNSMAEAFKDADVVYPKSWAPFAAMEKRTELYGNGDQAGIDQLEQELLSQNKKHKDWECTEELMKTTKDGKALYMHCLPADITGVSCEEGEVEASVFDRYRVELYKEASYKPYVIAAMIFLSKVKNPQKTLTELADKATPREVK

SEQ ID NO: 6458 - protein, 182 aa, Enterococcus faecalis
TWYGDCFANFHSSPSRYPFADACTLSLDRRMTAGETWESCLEEIRNLPAVKKYGDDVTVSMYNYDLLSYTDLTYEIECYFPTWVIPENHDVTKALMETHKYLYGETRKGSVETVEMREERPLLDKWTFSTNGVSIMGRNGIPCIGFGPGAEAQAHAPNEKTWKDDLVRCAAVYAALPTVYCG

SEQ ID NO: 6459 - protein, 265 aa, Enterococcus faecalis
KNFMEVKGMDFNAVNAAAEGYREDMVKFLRDLVKIPGESAEEGNKIARAKAEMEKLGFDKIDIDPQGNLLGYMGSGEKLIAFDGHMDTVGIGEMSNWKFDPYDGYETETEIGGRGTSDQEGGIVSAIYGAKIMKDLGLLSEKYTALVTVTVQEEDCDGLCWQYIIKEDGIRPEFVVSTEPTDGGIYRGQRGRMEIKVDVKGVSCHGSAPERGDNAIYKMADILQDVRALNNNGDTESTAIRGLVRMLDPKYNPEWQEARFLDVVR

SEQ ID NO: 6460 - protein, 408 aa, Enterococcus faecalis
SNLKIEGGEVFLEKIKWTANEMPKTEDKYLPLMSKEKIEKALAFHKSFPQYSETPLAELNHMAAYLGLNDFFVKDESYRFGLNAFKVLGGSFAMANYIAEKLKKDVSELTYDELTSDQLRSAFGQATFFTATDGNHGRGVAWAANKLGQKSVVLMPKGSTQTRKENIEKEGATVTIEEVNYDECVRMANKMAEETENGVMVQDTAWDGYEKIPTWIMQGYGTMALEASQQLRKFGSERPSHVFVQAGVGSLAGAVIGYFANAFPENPPIMVVVEAQAADCLYQSAIKKDGEIRFVDGDLQTIMAGLACGEPNTISFDILKNHTSFFVSAPDWVSEKGMRMLGAPLKGDPQVVSGESGAVAMGLVATVMQDPDYQELHEALQLDETSNVLMFSTEGDTDPDNYKKILWR

SEQ ID NO: 6461 - protein, 457 aa, Enterococcus faecalis
MSILLKGGTVVSAYNRRQLDIRIDGEQIVEMGANLPVENSQIEDVTGCYVLPGFIDAHTHLELNNGKGSLSTADNFTTGSQAAVAKGTTTVIDMATPNKGGSLKDCLATWNQLAEGKSSCDYTYHMSMIEWKPTIAAEIQEMIAAGITSFKMYMAYDNLRTTDAEIFEAMKEIKKVNGMLGVHCENGDLVDELIQSYVSQGKLTPHYHPLSRPAAVEAEAVARYLMIAEMADLPVNIVHLSTKRSLEAVERARQRGQSVYVETCPQYLLLDDHLYDAPNFEAAKYVCSPPLRKREDQRALWQGIKEGAINTISTDHCSFNFYGQKTVGKDDFSKIPNGMPGVETRPELIYTEGVAKGRITLEKMVALLSENIAKQFSMYPQKGVVQEGSDADLVVWDPRTTGVIAARTQLQNVDYTPYEGFETQGQARMVYLRGQKVAEAGQVILANQGKFVFRKAT

SEQ ID NO: 6462 - protein, 1007 aa, Enterococcus faecalis
IKGVTLMSDIMHPISIEALLNWIFSEYQQDGTIFGIRKFYHADPTKTISLFGEKMETPCGPAAGPHTQLAQNIIAAYLTGSRFFEVKTVQILDGEDLPVSKPCIAAADECYNVEWSTELRVPQAYDEYVKAWFVLKLLSKEFELGDPNGFIFNMSVGYDLAGIQSPKIDRYINEMQNAEGTPIWAECQAAAKKYLSYFKKVDDLYIEAISPKVCHSITLSTLHGCPSDEIERIAAYLLSEKGLHSFIKCNPTMLGYEYARQTMDELGFDYMVFDDHHFKEDLQFEEAVPMLQRLQLLANSKNLSFGVKITNTFPVTIAANELPGDEMYMSGRSLFPLSISLAQKLSEAFDGKLQISYSGGADIFNSKEIFDAGIWPITMATTLLKPGGYQRMNQVANVLSAAEYPQMVHVNLDKLAQVVEKAKTQARYQKSIKLPESTKLRKTVPLTDCYIAPCRSDGGCPINQDIPAYLRYVSEGNYLKALQVIVDKNPLPFITGTICAHPCMTKCTRQFYEESIHIREVKLEAAEHAYDELLTTLEKPQPKENAPKTAVVGGGPAGISAGYLLAREGMPVTVFEKSETIGGVCSQIVPEFRISMESVQKDVQLAEFMGAEFRTGQEAPSLAELKNQGYTNVIYAIGAWKHGVLRLESGRALNSLEFLKANRENPTINPYGEQIVVVGGGNTAMDCARAATTLPGVKKVSVVYRRNKRNMPADEEELYLALEDGVDFLELLSPIKHENQQLTCEKMVLGERDASGRRRPIGTGEMIDIPADTVIAAVGEKVDTEFYQALGIHTDNYGKVVSNQETLETNIPGVYVIGDANLGPATIVEAIADATKAANNICLVHNHHYEKDNLNSDVAFVRNKRGILVTDEMSCSQASRCLECSTICESCMDVCPNRANIVVYVEGKPQIVHVDRMCNECGNCETFCPYASAPYKDKFTLFNSEADFYDSTNSGFYVQNPVDKICLLRLWGTVSTIQLTDQGLDVPEDLIALMVTMIEEYAYCMQA

SEQ ID NO: 6463 - protein, 456 aa, Enterococcus faecalis
TWGIGWKIGEEYMLLIGNGRLITRDAQNHFFENGCVAIDGQVVKQVGTTEELKQAYPEATFIDAKGGVIMPGFINMHNHIYSTFARGLSLTNYHPKNFMDILVDQWWRIDRALTLEDTYQSGKVAYLDSIRNGVTTVFDHHASYGEITGSLTQLSNAADELGIRTCLCYEVSDRDGEQKMREAVQENAAFIKASSLRNDDMQKAMMGMHAAFTLSDASLELCAANTPDGIGYHIHIAEDLADVHDSLKKYGKPIVNRLFDLGILGKQTMAGHCIHIGPHEMELLRDTDTMVVTNPESNMGNAVGCPPAMRMFNEYGILMGLGTDGYTNDVTESYKVGNVIHKHHLADPNAAWAEIPTMLFDNNPQMANRYFKTKLGVLEPNAAADVIIVDYHGPTPMTKENYNMHILFGMNGGMVTDTVINGEIRMRNREVQGIDEEKVWHDAQTQAQSFWKRVNQ

SEQ ID NO: 6464 - protein, 77 aa, Enterococcus faecalis
HVFFSYFPTYSPRLANAYKSIAQSFTNIACLAFLIYISYEKHLKRLHFFTNELINLIKVYHLTLKKTMLHKKYFLEF

SEQ ID NO: 6465 - protein, 225 aa, Enterococcus faecalis
KLFVPGTLERSLFMLSDEKLTFLTQIAKGLAGQFGENCEVVIHQINEDNINNSIVSIENGHVSSRHLGDGPSQVVLEALKKDPSELNDHINYLTRTHDGRILKSSTMYFKDENGQLDGIFAINYDITTLIAAESNLKSLISTAEPEEDKDPDYIPQDVNELLDDLIHESVKLVGKPVPLMTKDDKIKCIQFLNNKGAFLVTKSGDKVSNFFNISKYTLYSYIDAK

SEQ ID NO: 6466 - protein, 177 aa, Enterococcus faecalis
KQLVYRKWGLLMKNRALLLIDFQKGIESPTQQLYRLPAVLDKVNQRIAVYRQHHAPIIFVQHEETELPFGSDSWQLFEKLDTQPTDFFIRKTHANAFYQTNLNDLLTEQAVQTLEIAGVQTEFCVDTTIRMAHGLGYTCLMTPKTTSTLDNGHLTAAQIIQHHEAIWAGRFLTFLSL

SEQ ID NO: 6467 - protein, 768 aa, Enterococcus faecalis
EKQIVCRKKGDKMNYRELMQKKNVRPYVLMARFGLEKENQRSTREGLLATTEHPTVFGNRSYHPYIQTDFSETQLELITPVANSGTEMLRFLDAIHDVARRSIPEDEMLWPLSMPPQLPTKDEEIKIAKLDQYDAVLYRRYLAKEYGKRKQMVSGIHFNFEYDQALIQQLYDEQSEVTDCKQFKTKVYMKVARNFLRYRWLITYLFGASPVSEDRYFRVYDDQPQEPVRSIRNSTYGYRNHDNVKVSYASLERYLEDIHRMVENGLLSEEKEFYAPVRLRGGKQMSDLPKTGIRYIELRNLDLNPFSRLGIVEDTVDFLHYFMLYLLWTDEKEEADEWVKTGDIFNEQVALGHPHETIKLIAEGDRIFSEMIDMLDALGIRKGKEVVGKYYQQLRNPQDTVSGKMWTIIQENSNSELGNIFGNQYQSMAFERPYQLAGFREMELSTQIFLFDAIQKGLEIEILDEQEQFLKLQHGEHIEYVKNANMTSKDNYVVPLIMENKTVTKKILSAAGFHVPGGEEFSSFIEAQEAHLRYANKAFVVKPKSTNYGLGITIFKEGASLEDFTEALRIAFKEDTAVLIEEFLPGTEYRFFVLDNDVKAIMLRVPANVTGDGKHTVEELVAAKNSDPLRGTNHRAPLELIQLNDLEKLMLKEQGLTIYSVPEKEQIVYLRENSNVSTGGDSIDMTDVIDDSYKQIAIEAVAALGAKICGIDLIIPDKDVKGTRDSLTYGIIEANFNPAMHMHVYPYAGQGRRLTMDVLKLLYPEVVQ

SEQ ID NO: 6468 - protein, 61 aa, Enterococcus faecalis
KLYDGGSELERQVMPMCIRCTLTKGAFFLSIEATLELMISFATLVALLIFGILEATKNDKK

SEQ ID NO: 6469 - protein, 150 aa, Enterococcus faecalis
MANDDLQQRLDKGMYGTPLVNPEEQHKYMGTFRERCRLSMTVAEMKDAQNQKHLLEELAKHPEVTVLLNGEISSDLQSTYIKLLNQHGANFKIVNNFVENNPDSLGLLLAEKHAVDEPVIDVTEKYPQATETPKEEPTAKKSFWQKLFHS

SEQ ID NO: 6470 - protein, 99 aa, Enterococcus faecalis
KRSFLMKKIGLFVLLLLFSLLSLVIGVKDIALFQLFQLDAQQQFVLFTTRVPRTLSLIIAGSTMSISGLIMQQLTQNKFVAPSVAGTTDSASLVLVLTT

SEQ ID NO: 6471 - protein, 203 aa, Enterococcus faecalis
ENKMTKQVNFRPEVKKVTSKSNGNIEVLLVVSNASLKGKYESLNEFLGKTVSTTIEPETVEYKVPVNKQTNKPNVEYIVNNDGTVEVLKEEQTSLEMGDDVQEVEEVAVQVSKETIDEFIKKATTIEWPESVTINVRGVLHRIDEGEALEEIAADHDVSVENLINQVELARQHFAPFADSWSKNKENIIFPEKTVEDDEEEIE

SEQ ID NO: 6472 - protein, 68 aa, Enterococcus faecalis
VFILLEIYYTPTSAIIADALAKTYEVVSLETARNIAKKFKASLKQKTDLYVIEGILIDAGYKKEPVNL

SEQ ID NO: 6473 - protein, 253 aa, Enterococcus faecalis
LISFGPATKSIGEGLGGIVNYVVGPLRKLNVVSEKSYIDFVEKINSKTDSIPVDNRDDSKLGFALKTMEDARYQLEDEDMREYFSNLLAGLVDNRKNQDSSPRFSIILCELTTIDANLLKKLYKLSITPTIKVRVQAPNGNGIDYIENLILTQKGIVENNFSDLSPSLQTLRSYGLIDIRPSIELTQKKHTKIYDDFENSTYFKTLKYNLNSFFANSSFFKDTGFSIISIRGSIHVTDLGFLFCSKIFSSEEE

SEQ ID NO: 6474 - protein, 60 aa, Enterococcus faecalis
MEQFLLTKTGKKQIDIKGTGMDHNEIVFTLAATLVGYSKELGLTKAILNESMYVLWKDGE

SEQ ID NO: 6475 - protein, 99 aa, Enterococcus faecalis
PCLFPFMLVYFGIRAIFRRFQCMSYPEVYIIGRQVDGVYVEYLHGAEQADLFFDYTIARDERNHMNKTNMKDGTWKILKYGRPITVELNNKKANRPMVD

SEQ ID NO: 6476 - protein, 194 aa, Enterococcus faecalis
VKKAANKKSRISPTVDNVWITLWKSRYHYTTNHKRGNQRMVLFDVKKYETPDAKDVDMEQTKHNVSVFLSAYLAARCRVGQPREPKVTASFSLVPPSTAKNTFEAEQMLIQKEEAQEEFDYLHKLFVRGYSAIQHPHKPDVTERRKRIFYDRYINGNPIYLAAQRNCISEESVKQESNMIIVQFASALELVAFK

SEQ ID NO: 6477 - protein, 141 aa, Enterococcus faecalis
KGISKTMRVLIRSSASGSEYWDTEEKRNVFVPKGQEPDFEVTENPESMLSKEADLHVGGLPITVGNVTIDTDGIKGERLLTTASAADDEEQDELVPSDDESVVLEEMNVKELREYAKRKGIEIPSAVRAKGEILNIIKESE

SEQ ID NO: 6478 - protein, 125 aa, Enterococcus faecalis
IMRYCQFEGCSNTTEKGAYCSEHARKSRKKKKPINVYHHDNKSFYRTKEWQDVADFVYEREGGCCQRCGRFVFGRQAHRHHVIPIKKNEMLKLDPNNIRLLCPKCHVIEENEADEKKVFPSYFKK

SEQ ID NO: 6479 - protein, 151 aa, Enterococcus faecalis
KMTTKAQRKAIIDEKVNHEKTRILEIMRKSDLYTITLDPLIESYLDIFEVYQYKYMLWKEKGFPETQKTTNKAGATNNSKHPLAQQVEVWADKKMKALDLLGLTNKSKTGRQITGGSTARADEEMKRPEEKPVNELAEHRKKWRKKAGNET

SEQ ID NO: 6480 - protein, 576 aa, Enterococcus faecalis
NMIEPGVNYADLFAKEVRKHPKKYPKTVRLAIDRWYRWKKRKDIWFDVDRANEMMDWVESFIVHTKGDMVGKPFLLEPWEKFIYSWIYGWVKENEKGQVVRVTREAYVQIPKKNGKTLIAVGALGYAMYGEGALSVDCYACASDFAQAQYAAKPFAATILNNPVLLDGTKIFKGPKGTVSSITYDYLHGDMAYTNKFIVQTKNIDNIEGSNPYFVLNDELHKQEKMEQYDNFKSAQISLPQPLMFNISTAGKGSSSVGIRVYKEAKEVLKRDDNDSNFVLIYEPNKGYDWTDRKVWEMCNPNWGISVDLSALESAFKTAQRSAHSKAEFLTKHLDVFVNGADNFFEQDQVEPCLVPTNELGNLSGEPCWIGLDLSKSRDLTCVSLNFPTWDAEGKAILKVKQLYFIPSENIDFREKEDNVPYSELAEQGFVEFCDGKLIDQEQIFHFIEDCMDFYDVQQVNYDPAMSDRLVEKLENLGLECVQVDQYARVLNSPLEDAERLFYEQRIMFDNPLFLYCALNVVVKMDFQGRKVPSKNQSKRKIDGFVAFLCAHKETMDQMIDVNEDDMDEYLDSIYR

SEQ ID NO: 6481 - protein, 413 aa, Enterococcus faecalis
RGGEILKLRDRLSNAVYGFLEKRGWIEDIYGNVTRYSQRFVNDSSIMESSDVYELVQDISNQVALAEPVVIGPDGEEVKNHFLLNILKNPNDYLTGFEFAKLETNTLLINGEAFPITDNDQLHLGYGVQTKLDDRLIERFSMNGQPIPGSMIRHIKNIGVDSLKGAGIIDLAKSTLEGVLSAEKVLTEKYKKGGLLAFLLKLDAHINPNNSAQQKIVKAILNQLEETQDNDSHSVKMIPLGKGYSIDTLKSPIDDAAILNYLGVYKKDLGKFLGIDVNTYQALMRTDIEKAMMYLHNKAIKPILKNKSEHYSALFFMPNSGYRVEWKINILDFVPYSTKTNIGYNIVRTGITSPDNVAEMLGFPRQNTEATQAVYISNDLTEIGKKNATDNSLTTEDDLKGGGKNEETGNSDI

SEQ ID NO: 6482 - protein, 195 aa, Enterococcus faecalis
REVVRMKKQEIRTFDITNLKTRSEEDSQTQIVTGYAAVFNSPTELWEGLNEVIKPGAFSRALSNSDVRCLFDHDWGKVLGRTRSGTLKLEEDDKGLRFEVELPNTTVANDLIQSMSRGDINQCSFGFYPTEETWDYRSDPVLRTIHEVELYEVSIVSLPAYEDTEAALSRNKQEMKQDIKTRKKLIEKIKTALEA

SEQ ID NO: 6483 - protein, 458 aa, Enterococcus faecalis
EEFIMNKELLRQLQARHEKRLSDLQGKIESGEVREADLDSVNEEIDGLIDELKAIKAELGDDNSESGDGEGDDGTAKSDNTDDESKEDREKDTNGNNDDKNEENRGGMISQEQRDGLLRTIHEGMEARNVMSNEQREKQIRKAFADFVIGNISESEARALGIETGNGSVTVPEVIASEVISYAQEENLLRKYGTVIRTAGDVKYPILVKKAEANVNKKERTTDITETAIQFDEILLDPAEFDALATVTKKLLKMSGVPVEDIVVEELKKAYVRKEINYMFNGDDAGNENPGALAKKAVAFEKPVDLTAAGAGQKLYDALIEFKNTPVTEVMKKGRFIINRAALTAIEKMKTDDGFPLLRPFTQAEGGIGYQLVGYPVDWTDAADKKGEPDTPVLYFGDFSAFKIQEVIGALEIQKLVEKFSGKNQVGFQIYNLLDGQLVYSPFEPAVYRYEITKPVGG

SEQ ID NO: 6484 - protein, 96 aa, Enterococcus faecalis
VVNVNNEAETLSLEEKFKAHIHFEEGMDDSMLSFYLNMAKNYVKTATGGQEEYLILMVAGIAYEYRVSEDELDKALNAITPFIIQGVIQHAEEADE

SEQ ID NO: 6485 - protein, 110 aa, Enterococcus faecalis
FNMPKRQTNRFRWKADLLNVKEETDSNDKVVTTYKLNRLLWYEDIGVTAQEKYLSQQAKTDVVRRIKVRLDKSITEKFSAVRIDSVTYKITRIYTNMDKREMELSLAYVD

SEQ ID NO: 6486 - protein, 115 aa, Enterococcus faecalis
VWLMSISFEKLRITLKSVGVPVTRDKAEKGTDYPYIVYSNVSQGKKMASSKVHRRMPYYQISFYTTGTEKDLIALENALEEAGIPYTDFVGIQGDENDDTVTNFYTYVRCIEDGK

SEQ ID NO: 6487 - protein, 124 aa, Enterococcus faecalis
GVLKMENNNGFADMADYLGKLSQVDATKLSIESLTAAANFYMEKLLPNIPKSLLKKKHMVDQVKVNIKDNEVQVAFEDTAFYWRFAENGTVNQKAQHFASGTFEQNKDQIEKIMTQQILDLWKG

SEQ ID NO: 6488 - protein, 227 aa, Enterococcus faecalis
KNYDSTNIRFMERMSKLGKQDVYYFEGLDDILIAMMTTKDAVGTEPAFGEVVRLPIATKLGIKGNGTALEKWASSKMFRRVSRETKHEIALDHVGIPIAVMDEIKGLIAQSGVTFGKNTAREFPYFAFGFIGNIENGGKKAVWYPKTQLSNVIDEEYTTAEDETKIDDVTANFVSTGLTYNNVMYSSFDSNRDSASIELFEKFIAQPVYDEEQWKKLAGPSRGGGSE

SEQ ID NO: 6489 - protein, 152 aa, Enterococcus faecalis
IMAKLADYGIVISDTPTVTIQGHQFPILLTMETMEYIADVYDDDYSKFEADMNEMINKSGGRISSKDLSASDLKIMRALIYGMLRTGGLEETPETIFKFLGMSATIVEIYGACMEIFAKQNFQVEDLKKSKKPQDYQTPKKRKNKKKKPQRK

SEQ ID NO: 6490 - protein, 86 aa, Enterococcus faecalis
RLKKIQEATRLSNSEKKEKQKEKASTEIGTPWAFYLYVALTLLGWSEDFFLKATPNLWLKSYIQWLVSNTEFEPPRSVTMDKSPWW

SEQ ID NO: 6491 - protein, 772 aa, Enterococcus faecalis
ERSANVSKQESDVVLNFKMNGEINYSRTIKDINKEMNLAATEYKNQVSAMDKNATQTEKLTATKKKLEKQLSLAEQRTKLLREEYEKSVKETGEYSEQSQKLYKRLLESETGENKLRSALQSTNEALKEQGNLSIKTAEKLAKIEKAGDKIKSVGQKLSVGLTAPIMGIGAASIAAFKELDECLDNITTATGATGSQLESLQASFKTVAGQIPADMQDISTGIGEVNTQFGLMDKQLEDTTGRMLKFSEINGSDVSQSTINAKKSMDLFRLSIEDLPMILDSVSKTSQDTGVGVDQLFDAVNRGAPQLKAMGLGFSESTTLIGQMEKAGIDSAGTLGYLAKASVVYAKDNKTMQEGLSGTIESIKGATTEQEKLTIASEVFGTKAASKMVEAIDSGALSMDGLADSAKNAAGTVDQTFSDILDPIDQAKLAQNQFKIAMGELGEQVQIALLPAFQAATDAIKKVSEWFGSLTDSQKQTILKIAGVEAAIGPVLVVLGTLASSISSLIPVIAFIASPIGLVIAAVAAWVAAIVVAYNKIGWFRDFINTSFKVIKDIVVGVFNVLKDTTKSTFDFITGFIGGAMDGAAKIIGDYVNEIKRIFGGIVDFVTGVFTGDWSRAWQGVVDIFGGIFEGIAAVAKAPINAMITLINGFIGGLNNIKIPKWVPGIGGKGFHIGKIPYLAEGGTILNGQAIVGEAGPELLTAKNGKTTVTPLSPEEKARGIGGALKGGNTIEQHVHIGQVDANNPSELDRMNRKLYKASAQAFYDLGGVPT

SEQ ID NO: 6492 - protein, 243 aa, Enterococcus faecalis
LRRCSNVIFMNPDEPNFIWKDLNAVRDMGCIIENELSEVLPNKRYETYSIIGRSGEFNETFNDYEPFDYEIEDVTIPYENLAAVKRWLTGKSKLITHNDEDKYLDAICTMSKPTSFKNEWGVFYTFNVEFRCQPFKRKVNEQPKVIKTKSIEITDHGDEIAFPYIEINSKGGDITLNIGSNSLTILRTQSGIVTIDTEKGKAIQEGNPLFTRGSWIKTNPGQNKLNISGNFIEAKFWNRSAYL

SEQ ID NO: 6493 - protein, 935 aa, Enterococcus faecalis
ERVFMTQNFIYAYTAIPENLNDNGMALPDWQDLPEINRVLNGVYRFYGNYARDGQYRSYLKKGNFLKAQVEDGSYQYFEIYNIKKNLQSVSVTARHIGFMANKNFIIDSFTANGNGTQIMNNLKAALTFKQRFNYLSNVGTTHQFTAKQVGPIDAIIGSNNGNQNLTGVTGGELEMDNFNLKLVKQIGADNGFRIDFGINLEAIDEDYDDESIINSLFLIGGVPDNDYDQDKEPITYGFLEIAGVNDSNRRIGKRENSECKTVDELKKWGQSLFDKDRIHEPKVTHTISMVALEHTLEYEDMYEELSSLHFGDVVHVRAKEVDIEVTERMVEYTWFPTLGKFKNIVLGNDLSLYTSTVNNQTQELKQKIDNRTETLVQNVLNATAWITGNSGGHVVFRPEKAPSEILIMDKNKVATAKRVWRWNLNGLGYSSNGVNGPFELAMTSKGEIVADFIKVGIINANVLQTSFNKATDDVLKLVAGALQIWNNKKKIMELTKKGMEFWNGSSHIGTIGTKGNPFPGVVDKNGNPVVSDGNSLLLVADNPKKIIGLSNQSGTGHLITGPTQFFVGNNFNFFGPNGSKAILTVDRLIVGGKEVIPGQNGGGGSGAGTGGYPSEVTSDADKFAWDLWSYLLANGYSKAAAAGILGNVQGEVGPSMNPDTEQIGGPAYGWVQWDGSAYPLVGAPTWNGREYVQRLIAAAGIKQDYRTSLAQAQLINWCMFNGQWLGQVSPLTVDEFKVVSSPKTAAYAFELNFERPAAAHPERQTYAQAWYDKFKDLKASTATGKAGIEHLETLMGKWLGNGQCYAVPAEYSGFMGGCGLGAGTIYGFSHVIGDTSSAADIGEAYDWNAVGWRVIQNPTYQDLVVGAIVNIRRGGQWGTGWTVDPTYGHTGVIYGLNNGRIQTIEQNAEQGQIVAKYDRLYFANSIQSIVIPPK

SEQ ID NO: 6494 - protein, 308 aa, Enterococcus faecalis
REEDFSMVKWQATLSTTEPYNYIGIQNVRQGNRNTEVLEAILVENALPLDLTGCEVFFESVIDNKYPIQRAAKIVNAKKGIIQYTFDEYSMQSLHRQEAYFSIHKGDNLIGSTQNFSYFVVNAASKTEGEMGSYWQSIEDLIADMTAFINENKGDFTAWMNARKEEFEKWRKNQQDTFEAWRNGQETDYLKWFESIKDILKTIDPGGTMLAELMDARVDIQGVRHNSLSERLLADMNYLYHRLEERLYTIKYGNVNTLEILEDDSFSKNHEVEVLGTVNHPIEEGALIIATVDDSKQNVFTIEGVDNG

SEQ ID NO: 6495 - protein, 106 aa, Enterococcus faecalis
TMVDAKRMMETDENGIKRQFFPMTHVSAILGLTEIMAGNSKVSSVNGHTGAVIITRADLDLPIDGIMISKQEYDKMLKIIADYEDGKLGGSGVEFEKVKGDEEINA

SEQ ID NO: 6496 - protein, 105 aa, Enterococcus faecalis
MPDLYVVKKDGVAIDVQTSTAGVVGLNEFVDGKISGAEAGTVSSVNGHTGEVILTASDVKALPDTTVIPTLPSNATSEKDGLMSKTDKAKLDALPVFTFEKVGEA

SEQ ID NO: 6497 - protein, 185 aa, Enterococcus faecalis
SVMADIVQLKENGVVKYMKTHADAIDGVEGKLVKAVGNETVLGTKNFQDGIQIGGKSVSVNAKPTYEVVKDYWDGTGAYLTESQSVTISNSSNVDEIVLIFSRYNDNGGGIVHSIPVTPNITKLKYELPAVAWVGSASTDPTIAYKKISISKSGTSLVITGDTANTLNEANKKIVFREIGVMRRK

SEQ ID NO: 6498 - protein, 130 aa, Enterococcus faecalis
IGVDNKMKKIYKVLYPVGFQIFEVQDDYVVALPFVEEKPLENLVNEQSQFFNFSEQKWEEAVTQDYTKKLNLLENLANGLEVSNSELKQANEKLTAKAESLAQINSKTMLTSLQNTREIDAIKEQIGGAK

SEQ ID NO: 6499 - protein, 83 aa, Enterococcus faecalis
RDGDDNLKDDPLIEIVDRLARIETKLDNHEQLREKADIALSMAKNNEGDIAEIKENQKWTWRTIAGIGVSVAVYLITKYLGGI

SEQ ID NO: 6500 - protein, 106 aa, Enterococcus faecalis
RRYCGNKRESKVDVANNCRNWGFCCCLFNHEILRRNLEMILPDKYYKIIKWGVLTVLPASSVLIATLGKAYGWQQTDMAVLTINAIATFLGVVTGVSAYNLKDKEK

SEQ ID NO: 6501 - protein, 441 aa, Enterococcus faecalis
FKRQGEVKMKKKILVGALVALFFMPLNVFAAKGDQGVDWAIYQGEQGRFGYAHDKFAIAQIGGYNASGIYEQYTYKTQVASAIAQGKRAHTYIWYDTWGNMDIAKTTMDYFLPRIQTPKNSIVALDFEHGALASVPDGYGGYVSSDAEKAANTETILYGMRRIKQAGYTPMYYSYKPFTLNHVNYQQIIKEFPNSLWIAAYPIDGVSPYPLYAYFPSMDGIGIWQFTSAYIAGGLDGNVDLTGITDSGYTDTNKPETDTPATDAGEEIEKIPNSDVKVGDTVKVKFSVDAWATGEAIPDWVKGNSYKVQEATGSRVLLEGILSWISKGDIELLPDATVVPDKQPETTHIVQHGETLSSIAYQYGTDYQTLASLNGLANPNLIYPGQVLKVNGSATSNVYTVQLGDNLSSIAAKLGTTYQTLAALNELANPNLIYPGQTLNY

SEQ ID NO: 6502 - protein, 154 aa, Enterococcus faecalis
RQKHTQEDFYMTQVHFTLKSEEIQSIIEYSVKDDVSKNILTTVFNQLMENQRTEYIQAKEYERTENRQSQRNGYYERSFTTRVGTLELKVPRTRDGHFSPTVFERYQRNEKALMASMLEMYVSGVSTRKVSKIVEELCGKSVSKSFVSSLTEQL

SEQ ID NO: 6503 - protein, 201 aa, Enterococcus faecalis
  MISC_FEATURE (70)..(70): Amino acid 70 is Xaa wherein Xaa = any amino acid.
PKMATVEIIGFHDSKVGESEETWTTFFEYLKEPRLKGTELVISDAHKGLFSAIRKSFTNVSWQRCQVHFXRNIFTTIPKKNSKSFREAVKGIFKFTDINLAREAKNRLIHDYIDQPKYSKACASLDDGFEDAFQYTVQGNSHNRLKSTNLIERLNQEVRRREKIIRIFPNQTSANRLIGAVLMDLHDEWIYSSRKYINFDK

SEQ ID NO: 6504 - protein, 526 aa, Enterococcus faecalis
QSVLKSLGHAPTYITKINDFSSDVSEAALTLGTEIVVPNSESQGKDSVDLIRDSLFSIQVQQPWLLLQFDDSNIEEIGEDRVNKILSVSPDENKGKDREEAVKAEIEDNDNANLSITKTMNRLGIVVFLVLFNIGISFFVFLLTGIMLFSQILFIIFAMFLPISFLLSMLPTYESLGKMAIIRLFNTIMMRAGVTLVITTAFSISTMFFNISATYPFFMVAFLQIVTFAGIYFKLGDIMSMFNLQSNDSQSMGRRVMRRPQMLMNRKLRQLNRNVGRTLAFGGAAAVGNKLAKEQSKPKFKPAGSSLRKNSRLPNDREVSSDSAKENPISNNKKQSRMNLTGRKIGKVLDTQALVKDKAKQVKDQVRNTPTNLKYILHKGLEKTKKAPKEFKRGLVQEKADREKLRDKQRQRRDEKMDEKRKNLGEVTDRHGKRRSNVSIKEDPKPQKDRILKNELPKRIVMVKPNSEVSRRLVKQNLVARENNQLLSKKNSFQQVKQRSTLPKRANQKVQRIMKARPKPKSGDKK

SEQ ID NO: 6505 - protein, 335 aa, Enterococcus faecalis
KMNLKELSVISLTMLMLSFMGILMCVSLLFGEDSEGSGTSGISPGGNSVSEEVLKHRSMVEKYAKESDILDYVPILLAIIQVESGGTMEDVMQSSESAGLPPNSLSTEASIKQGCIYFASLVKSSKELGCDQDSIIQAYNYGGGYLNYVAKNGKKHSFTLAESFSKEKSGGQKVDYPNPIAIKENGGWRYNYGNMFYCLLVKQYLTTTQFDDKTVQGIFDEAFKYEGTAYVFGGSSPATGFDCSGLTQWCYAKVGLKLPRVAQDQYDVMTHIDLKDAKPGDLIFFHSTYDAGTYVTHVGIYAGENRMFHAGNPVGWTNLTESYWQQHLIGAGRYN

SEQ ID NO: 6506 - protein, 309 aa, Enterococcus faecalis
EKRGKIMKIKIERIQKEKMSKKKKERTISVGKHRKMVLALWLLLSCSLAFGIYKNFTAIDQHTTHVKMVVKEKVINTSGVESFTKNFVKEYFSWKNNKEVIEKRMSNLGQYLTEEGLALSQDMVRVDIPTSSEVNSVKILDVEKRSKDFVVSFLVDQKITEGKKSEQISSAYRVKIFEDEKENHIVTSLPTMISKPGKAKYEVKQVESDSDIDAKTTQEITEFLETFFKLYPTASEKELEYYSENESMSQVSSDLRFVEITNPIYLEKDGSVQVKIVVKYLNEIEKVTNSFQYNLLLNKEENWKIINGE

SEQ ID NO: 6507 - protein, 418 aa, Enterococcus faecalis
KKESPFCRIELPQHIHRREDFPMNDFTTEILKTLANKGDLNELFRVHLEKAVNTLLKTELTAFLDYEKYDRIGFNTGNSRNGSYDRTVKTEYGELHLQIPRDRNGEFKQQTVPAYRRTNDTLEETVIHLFRKGITMSEIADLIEKMYGHHYTPQTMSNITKSFTEEVTAFKGRELHDRYAAIYMDATYIPLKRKTVAKEAIHIAVGIRPDGSKEVLSYAIAPTESITIWEEILLDLQERGLKNVLLFITDGLKGMVGAISRFYPKARFQHCCVHVSRNISHKVRVDDRKEVCDDFKMVYQTSSKKVALEARGAFAEKWKTSYPKVVESILSNDHLLTFYDFPLAIRKSIYSTNLIESFNKQIKKYSHRKEQFQNEESMERFLVSSFDTYNQKFLGRSHKGFQQAEGELEQMLSQLIEN

SEQ ID NO: 6508 - protein, 79 aa, Enterococcus faecalis
ETFHRLFVLELFLAVAVFLDLLIKGFNQVRRINTLAYGQGEIIESEQVIVRKNRFNHFWIAGFPFFRKSTTCFQRHLFR

SEQ ID NO: 6509 - protein, 96 aa, Enterococcus faecalis
YMSKHSKCTDTYEKNDEAALWDLLLFLSIFNLLGCTLRPRNTFKGGLPIANRIRNERLEIKLTEEEKALFEEKRKLAKCKNMSHFIRKCVLEKEIY

SEQ ID NO: 6510 - protein, 60 aa, Enterococcus faecalis
KVCRMLLKVAIKCYCVKNKGGIIYEKIVPRGACLLLALCLSLSAVGCQKSKNKRRTIHKF

SEQ ID NO: 6511 - protein, 138 aa, Enterococcus faecalis
AQLGVKKVKIKEGQSISSEEEGMSINANGKNETFKPSDYTLEAKKEYVYEYLGLKFKLSDKFRNYIADKKIAMLDDQSPIDKELKYAILTFEKMTEEQKNAVIEKMGDGYKNWQNELERIGTIGIFEKNTSEEKNLKL

SEQ ID NO: 6512 - protein, 225 aa, Enterococcus faecalis
KKYIRRKKSKIIKCDTHTKIGVSSDGKYDCYLSTNSGAESNLLDELKRTEIQIIDKKERPKNGFVLSEKTDLENTEAFNKESVKDLRKLSTKDINGKDFTSKDFEKYDLTMVNVFATWCTACVKEIPDLVEVQNEMKSKGVNIVGVVTDPVDDNGENKEAIEKSKLIHEKTKASYPFLMPDKTNFNGRLNGIQAMPETFFVDSNGETKVVLDKAIRICMECIGIG

SEQ ID NO: 6513 - protein, 101 aa, Enterococcus faecalis
EFVWSVLELDRIKNIINGSTKKDKYKIRDRFKHLFQSVWFLITNSYFEGFKTGKIYGGNLKKICVPGINCYSCPGAKGSCPIGSLQAVIGNSKYKISYFII

SEQ ID NO: 6514 - protein, 151 aa, Enterococcus faecalis
YYLYFSLILPLFLVDILGQGSPYFCKLICPIGMLEGGLPLVLLNKSMRSTIGFLYYWKGIILIVTLLLSIIIYRPFCKYICPLGAIYSIFNPISIFRYRLDKDKCINCGKCKKVCQMNKDSVENCNHLECIRCGRCKNACPVDAISYGVRK

SEQ ID NO: 6515 - protein, 79 aa, Enterococcus faecalis
LTLKYLPSFFVIDIEELELSYKAFSISLLDFIIVKQEYKQERTIVNMIKIIKVLFFFLVIYAIAFFITFLTTPLYFLTP

SEQ ID NO: 6516 - protein, 431 aa, Enterococcus faecalis
RGVVRKVIKNAIAYITRKKNRTLIIFIILTIVLSCLYSCLTIMKSSNEIEKALYESSNSSISITKKDGKYFNVNQFKDIEKLKEIEEKIIQYDGLAKLKDAKVVSGEQRINREDLSDEFKNVVSLEATNNTKKNILFSSGVFTIKEGKNIEENDKNSIIVHEEFAKQNNLKLGDEVDLELLDIEKSGKIKSHKFKIIGIFSGKKQETYTGLSSDFSENMVFVDYSTSQEVLNNSENNEIANKILMYSGSAESTDLALNKLKELKIDESKYFVEKDSNAFEESLESVSGIKYIIKVMTYSIMLVGMVVLSLILILWLRERIYEIGIFLSSGTSKIQIIMQFIFELIFISIPSIISSLFLGNVLLKVIVDGFINSEDSMISGGSLINSSSFMSNITTLGQSYLILISIIVLSVVFASSLMLIKKPKEILSKIS

SEQ ID NO: 6517 - protein, 221 aa, Enterococcus faecalis
EKIMDILEIKNVAYSYANSKEKVLSGVNQKFELGKFYAIVGKSGTGKSTLLSLLAGLDKPQTGKILFKNEDIQNKGYSNHRKNNISLVFQNYNLIDYLSPIENIRLVNKSADESILFELGLDKKQIKRNVMKLSGGQQQRVAIARALVSDAPIILADEPTGNLDSVTAGEIINILKTLAKDRNKCVIVVTHSKEVADSADIILELSGKKLKKVNKMNLEVE

SEQ ID NO: 6518 - protein, 405 aa, Enterococcus faecalis
IMIKNAFAYVTRKSLKSLIIILVILSMSTLSLISLSIKDATDRASKETFANITNSFSMEINRQVNPGTPRGGGNVKGEDIKKISQTDSIDSYVKRINSVADLVDYDIIETQETLANQSPERAKNFKRTVMLTGVNDSTKETKFVSEAYKLVEGKHLENEDKNKILMHKDLAEKNNLKVGDKIKIKSNLFDADNEKGADETVEVEIKGLFDGHNSGGVSAAQELYENTLITDVHTAAKVYGNTEDTAVYQDATFFVKGDKNLDSVIKDLGKIDINWREYNLIKSSSNYPALQQSISGIYSISNKLFFGSLIFAGVVVSLLLFLWMNARKKEIAVLLSLGISKLEIFGQFLIEMVFISIPAFVGSYFLAQYTADKLGNNILNKVTGDIAKQIAKQSASSQLGGGARS

SEQ ID NO: 6519 - protein, 60 aa, Enterococcus faecalis
VVGQEAEGFNKTLSSLDINVLPKFMIYVVIFMSLVLLVSLIISSFNILRRNPKELLIDNN

SEQ ID NO: 6520 - protein, 74 aa, Enterococcus faecalis
KVSATDPKCASLQLFKWTIGMFKQPHQSIKTQCVRLSQLLQFQTTDHDSSWQNIFNQINRTGRGFLLSVLSKLF

SEQ ID NO: 6521 - protein, 262 aa, Enterococcus faecalis
IQIGSTCDQCNEFYHDGRTKPCIIGYCRKSTLALFRTLFSRFSLATREAVQWIVIDMYAPYVSLVKKLFPNAQLIIDRFHIVQHIGRTFLNHRVKETTARLKGTSHSQRGLGKKLKRYWKLLQKEEAKLNYEKRVWRASFKDYLTESEIVDRLLSACPNLRQGYQLYQDILYAVKKRDQSLFEDCLNREVSGLPETYTTTLRTFKKFLPQIQNALHYSYSNGPLECLNNHIKVLKRNAYGFRSFYNFKLRIMIRHGKTFLTK

SEQ ID NO: 6522 - protein, 140 aa, Enterococcus faecalis
KRIYEYRTYLELKKQRFKCKSCQRTFVADTSVAEKYCFISQKVRWSVIARLKENTSMTEIARQKNISTSSVYRVMKRFYRPLNPFKQTLPKVLCFDEFKSVRHVTSAMSFIMMDGQSHALLDIVENRRLPYLERYFLGFH

SEQ ID NO: 6523 - protein, 221 aa, Enterococcus faecalis
VEVYMKILTVEDDNMIREGISEYLSEFGYTVIQAKDGREALSKFNSDINLVILDIQIPFINGLEVLKEIRKKSNLPILILTAFSDEEYKIDAFTNLVDGYVEKPFSLPVLKARIDSLIKKNYGHLEKFEYKDLSVNFNSYTAKINGEEIDVNAKELEVLKCLLDNNGQVLTRMQIIDYVWKDSEETPYDRVIDVYIKELRKKLQLDCITTIRNVGYKLERK

SEQ ID NO: 6524 - protein, 191 aa, Enterococcus faecalis
  MISC_FEATURE (139)..(140): Amino acids 139 & 140 are Xaa wherein Xaa = any amino acid.
IGEKMKKLKIFPKMFIQIFSVLGIIIILVHSLVFFIFPKTYLETRKEKIHNMANEISSNMNGKEIKYIEQTLEFYSKSSEIKVFIKEKNNKNEIQIKDNINVNLESDSNSLIIEEKEIKLNDGKKTNLQFVSTAEICQXXIPSPTQRGKKKRCPSFFFRRFFLVRKNRIVVSAGVSFSLGAGVRSLCANKM

SEQ ID NO: 6525 - protein, 254 aa, Enterococcus faecalis
MEFFCFALPDEDGEGKQPINELFSTLLRTIDELEFKNKEILKLEKLKYDFFKGASHELKTPLASLKIILENMKYNIGKYKERDIYINECIEIVDSLTKNISQILSVHPIENLNNDEEYLKINDTLEDILKKYEILANQKKITVNNYILDENVYIGKTALKIILSNLISNAVKYTDVNGVINIGIVNDWLYIENSYGNNKISNMDKIFDVKFDLNKENSNGLGLYIVSNILNNYNIEYKVLQDEEFFIFKIKIFS

SEQ ID NO: 6526 - protein, 340 aa, Enterococcus faecalis
LKCIQFGHSRNGIIHVHLNRICGVDLTIPRDRNGELSQQTLPAYKRTNDSLETTIIQLFQKGITMAEISKLIEKMYGHHYTPQTISNMSKLVAEDVLAFKERTLEANYSVIFMDATHIPVKRQTVSKEAVYITIGIRLDGTKEVLGFTIAPTESAYIWKEVLQDLRKRGLEEVLLVVTDGLSGIEESIHSVYPNAQFQQCCVHVSRNIAHKVRVRDRKEICEDFKLVYQANSKEEALDHIDFMIRKWKKQYPRVVNLLLNPALLTFYNFPHAIRRTIYSTNLIEGFNKQLKRYTRRKEQFPNEESLERFFISQFNQYNQKFLGRIHKGFKEIQDTLESMI

SEQ ID NO: 6527 - protein, 290 aa, Enterococcus faecalis
SHFFMEVIIMNVGFIGAGKVGCSFGKYFQEHKIQVTGFYSKSEDSSLAASNFTSSKQYLNLRELVDENDTIFITTPDGQIQEVWQEIKNYQIKNKLICHCSGAISSDIFSNIQDYGAYGYSVHPMFSISDKYNSYKKLKKSFITIEGDEKYAKFLCDFFKKLGNSTVIVSKENKSLYHAASVVSSNLVLGLINTSVTYLIQCGFTEKMAIEALYPLIEFNIRNIKEKGIIESLTGPVERCDISTIKGHCEVLSDEDRALYMLLSKNVLEIAMLKNINRDYSELEKYLGES

SEQ ID NO: 6528 - protein, 275 aa, Enterococcus faecalis
MKNTAVTFKESKLRNEKLTMLTAYDYSTAKIIDEAGINGILVGDSLGMVCLGHEDTLSVTMEDMIHHTRAVTRGAKNTLVVADMPFMSYQTSVYDSVVNAGRLIKEGRAQVVKLEGGIEVCDKIEAIVKASIPVMAHIGLTPQSVNAFGGFKVQGKDKEAAKELIRAAKAVEKAGAFAVVLECVPTKLAELISKEISIPTIGIGAGAGCDGQILVYQDMLGMYSDFTPKFVKKYANLSEEMNKAFTKYIEEVKDGVFPGPEHGFKISDDVLEKLY

SEQ ID NO: 6529 - protein, 294 aa, Enterococcus faecalis
CFRKIILKGSRNMVIFKTVNDVRSQVKEWKKQGLKVGLVPTMGYLHEGHESLIRKASKENDKVVVSIFVNPTQFGKNEDLGSYPRDLERDIEVCTRGRATAIFNPEVEEMYCDNASTFVNITGLTEGLCGASRPIHFRGVCTVVSKLFNIIPADRAYFGEKDAQQLAVIKRMVRDLNIDIDVVGCPIIREEDGLAKSSRNTYLSLEERSSATILNKSLTLAKEALNNGERDSLKIIEIISKNINTCNLAKIDYVEVVDSLSLQRVNYIEKSVLVAIAVFIGKTRLIDNFTFELQ

SEQ ID NO: 6530 - protein, 135 aa, Enterococcus faecalis
GAIIMKVTMLKGKIHRAKVEQAELDYVGSITVDMDLLEAAGIYEYEKVQIVDVNNGNRFETYTIAGERGTGMICLNGAAARCVSTGDKIILMAYCELNENEVKDHRPKVVFVDDNNKVERVTSYEKHGRLSDIIL

SEQ ID NO: 6531 - protein, 73 aa, Enterococcus faecalis
DNRNSIRKEVLHLIKFVKKTVAIPLTSSVLFHTDQGSQYTSFEFRKFIEDHPIVHSLSKPGYPWDNAVTEAFF

SEQ ID NO: 6532 - protein, 305 aa, Enterococcus faecalis
YFKASSADIRTKRQVIDANKHLYPISAMCRILGLSRQSYYYQSKPKKDESELEEVVAEEFILSRKAYGSRKIKKALSKRGIQISRRKISRIMKNRGLKSSYTVAYFKVHHSTCNEAKTTNVLNRKFLRDNPLEAIVTDLTYVRVGKKWNYVCFILDLFNREILGYSCGEHKDAVLVKKAFSRIRQPLTEVEIFHTDRGKEFDNQAIDELLTTFDINRSLSHKGCPFDNAVAESTYKSLKVEFVYQYTFETLQQLDLELFDYVNWWNHLRLHGTLGYETPVGYRNQRLAQRILDNELGCANASEAV

SEQ ID NO: 6533 - protein, 115 aa, Enterococcus faecalis
LDRKIKVCRLEENIPGGIFISKRTRRTFSQEFKQQIVNIYLAGKPRVEIIREYELTASAFDKWVKQSKTSGSFKEKDNLTPEQKELLELRKRNQQLEMENDILKQAALIFGRRDK

SEQ ID NO: 6534 - protein, 102 aa, Enterococcus faecalis
NYFNISTSDLIKEKYLMKKIDLINMIGMSIGILVNIVMFTDWLRVLFSNLIPIRYIGICGIILSILELFESRNTMNRIFACIILIVNLLPMVYFTFLYFALG

SEQ ID NO: 6535 - protein, 454 aa, Enterococcus faecalis
PLILCRWLLRGFSFSTIRSRGDYTMARKKRNPDAEKLAESILNAYQPESVDDMQDALKDVFGPLFEKMLQGELNNHLGYDAHSKEPKEHDNRRNGYGTKTLKTSFGEVAIDVPRDREASFEPELIPKRKRDVSDIEGKVLSMYARGMSQRDIAATVEAIYGFDISHEMISDITDAVLPELEEWQARPLAKCYAFLFVDCMYVTLRENYEAKEYAVYTILGYDLKGNKEILGLWLNQTESKNRWMQVFDELKARGVEDVFFISMDGVSGLEEGAKAIFPSVIVQRCIVHLVRNALRYIPSKDYKEVCRDMKKFYGASSLNAAHAAFGSFQNRWSHYSGAVDVWKRNFAHVEQLFDYGSAIRKIMYTTNAVESVHSSFRKVTKKGAFSNENALLKLLYLRTKELHAKWSGGRIQNWAMVLKQLMINETFSSRMKSMRFTFRNNGRFIQLCVRSKFI

SEQ ID NO: 6536 - protein, 433 aa, Enterococcus faecalis
IALSKYFLKESIIMSEKIMNTIQNKVSPIVTKIGNQRFLVALRDSFMGTMPVIMTGSVAILLNAFLVDFPMQFGYEKITDYFQWLVDINNLISKGSISIVSLLFIYCLGVNIAKIYKTDTLSSGLVALSSFIISISNSMTSTYNLSNNNNIDLTTLFTDVEGITVTGNSLNVTISGLLPGTQINSNGYFTAIIIGFLSSIIFCKLMNKNWTIKLPDTVPPAIAKPFLSIIPALVSLYIIAILTFLLNRITGKILTDVIYEILQRPMLGLSQSFFVVILVAFLVQFFWFFGIHGGNVMAPIMEGVFGVALLVNLEAYQNNETIPYVWTSVSYGSFVWYATLGLLIAIFWVSKNSHYKEVAKLGIMPVLFNIGEPVMYGLPTVLNPILFIPFLLCPAVMSSVAYLVTDFKLGFSSNTKCNLGNTTGLIWILFDRI

SEQ ID NO: 6537 - protein, 60 aa, Enterococcus faecalis
QILSWVSPVTQNVTWVIPPVLYGFFSTGFDWRSIILSIINLFLTTLIYLPFVRMANKKIG

SEQ ID NO: 6538 - protein, 618 aa, Enterococcus faecalis
YIKEGEDMQTFEIKEEFLVDGKPTKLISGAIHYFRMTPAQWEDSLYNLKALGANTIETYIPWNLHEPVEGVYDFEGMKDIVAFVSLAQELGLMVILRPSVYICAEWEFGGLPAWLLKEHVRLRSTDPRFIAKVRTYFSVLLPKLVPLQVTHGGPVIMMQVENEYGSYGMEKEYLRQTKQVMEEFGIDVPLFTSDGAWEEVLDVGTLIEEDVFVTGNFGSHSKENATVMKAFMAKHDKKWPIMCMEYWDGWFNRWGEPIIKRDGQDLANEVKDMLALGSLNLYMFHGGTNFGFYNGCSARGVLDLPQVTSYDYDALLTEAGEPTEKYFHVQRAIKEVCPEVWQAEPRRKTFGSLGTFPVQNSVSLLAVKDQMMTAQETMYPITMEEAESGYGYMLYSVNLKNYHHENKLKVVEASDRLHLFADGSLQTIQYQENLREEVMIKGTPEKEWIELDVLVENLGRVNYGFKLNGPTQVKGIRGGIMQDIHFHQGYRQYALTLSADQLKKIDYTAGKNPAQPSFYQAEFTLTDLADTFIDCRSYGKGVVIVNGINLGRYWQRGPIHSLYCPKEFLKKGTNEIVIFETEGIEINELIFCGQPIVKKLLTNDFSEIGSNIHNHIDS

SEQ ID NO: 6539 - protein, 138 aa, Enterococcus faecalis
RSILIVQQNNNEISTQHQFDAYCKKVLRNEAKSIRKRNDKIKENEEPLNDLNEGKYSQTHLDEQDVYFLFGMEILISDQKLSAAIDQLSDTRKKIVLLYYFAGFNDTEIGKIFNMSTSGIWYQRTKAVEQLKMEYGLW

SEQ ID NO: 6540 - protein, 89 aa, Enterococcus faecalis
TIENGIWLMVDKQRNQHYPLVPISIILSALKEDPISIKMILKHYHGYITKLCLKNGFNEVGQFITYVDEYMLRQLEIKLIEAILKFKVN

SEQ ID NO: 6541 - protein, 126 aa, Enterococcus faecalis
NSYVLLTKVADRLIIVNRKEETIMSKNNNKSNSSELEKYLFHPEKIEDSNNKMKRINQLPLVLTNKDLKEQFQISDSTLNRLIKLGDFPSCWFGIRGHYLRDDILEWVKKGNEEYFCDQFRLLRLL

SEQ ID NO: 6542 - protein, 392 aa, Enterococcus faecalis
MENMSRFKKHITATGKITWYFQAFRTTRRGFNSKREAQLAYLEMEKQHRNKQKRLASNDKFSVVSQKWFEYYRSLNEQKVATYDKREEQVKILNRWIGGKKLSSLSSEELQKFLFILKEKGIDGVNVGYAKNSLQSLVQVLNMVFNYCKKKNLINENPMKFVKMPKYQLSLKDLKESVNSLEDKFLTVDELRAFLNYGIVYEELPMSVLFHVLFYTGCRVSEALALQPQDIDFERNEILFYKQTAVKGKSKDFRIETTKTVSSARRVPVTPLVMEKLQELIDVLNKTKRNSNFVVDETYLFVYLDPGKRGVPYRREYVNDHVKRCVERCGINKDFHTHLARHTMASLVAEYCSWDVLKDRLGHTDSTTSKIYRHLTSTEKLKPLTAFNSLEG

SEQ ID NO: 6543 - protein, 60 aa, Enterococcus faecalis
NGIIFMFAIVLRVVILLITVKIVDYFANTPEVQIQRKLPEFEKVPPYDPRDNSFLIQIIL

SEQ ID NO: 6544 - protein, 85 aa, Enterococcus faecalis
FISDTNYSLSNTTTKFIYQTITIRKGASIPNYYWYDDGQFRGNLKLQRWQDYGEDPNIRGYICTYGGYVTNGSSPAQRIVDINEQ

SEQ ID NO: 6545 - protein, 142 aa, Enterococcus faecalis
EGVIMKKIGYFSCIIFFMFLVGCSNNKKENGNLLNASSFPLILTTIIEKEEDLTKGSIFFNKDKTMTLEKEYLVNPNNEDTKKTSRTEKKVYKNIKIQENKESYEIIGQLDKKTKKIEFKKVDEGKRISDAEGNVYGDFGGK

SEQ ID NO: 6546 - protein, 148 aa, Enterococcus faecalis
AFIIQLMIMQRYIQTGLFTTKEIQAEIATMENSLKKILGETFQTTLWRYPGGHMSWGGTEKSDELFKQLGIHWIDWNAMVGDAEPLDRQPTTVAEMLAFHQHSLEVYPDYNIRVVLMHDSVDKELTKQALPQLIEFYQANGYQFGVLY

SEQ ID NO: 6547 - protein, 136 aa, Enterococcus faecalis
PKRSESMRHKKRKFKINGYVLFSALILIVLVFIQTFLLTQPKITSKNDDTTQTSTKNSTAKKDSPTKLEKESTHMTISSKKYAYSADKIRKYITGEEPYKGEKLVFLTFDDGVNNQITPQVLDTLKKYNVHAIFFL

SEQ ID NO: 6548 - protein, 197 aa, Enterococcus faecalis
ERAVEMDHQQVLKNEIKQYLVSKNCEKTYYHCMEVGEYAYQLGEKYLTSPEKVSIAGYLHDISAVYPNNQRISVAQKYGIELNETEMAFPMIIHQKISKSIAKMDFGIEDNEILSAIECHTTLKKNYSDIDLVLFVADKIKWDQEGKPPYLDGLLQALNCSLENAAYFYIDYILKHDIKVVHPWLWDAYNQLNLIIK

SEQ ID NO: 6549 - protein, 159 aa, Enterococcus faecalis
KHNSSQASQMSTESKSSTTQSNSSASTKTENQLWSVQKKAQLQQFMADWGQRMNQTYKEYIPGNLINFNGVQAPDGLVGNVTMQPAIGQHPIYLEWSENGQVKDGYALVAVYSDAETQPEMQKHLYLFTIVNNQPLVLVTMPNQGHPYDMPFIGPRLGE

SEQ ID NO: 6550 - protein, 146 aa, Enterococcus faecalis
STTELVSTKPVDNINTTKRSEVTEKSSTKPMQIKDKLAEEKVSDTYQLVEDFGNTYANFSSINDRNEKLKKLMTAECVKKNGIDVKTGAKLESKGEVSAIYQNDKKEYAVLLDCEQNGTKTRVLLLAKVQGNKVAEMTYNSVKQEY

SEQ ID NO: 6551 - protein, 75 aa, Enterococcus faecalis
LACNGSKLDKTGEEFKNSIMKDSSYGDEYSEDGFSFLIYKDKDTNRYLADVWVPVKDETSALEYFYYYDESSPRD

SEQ ID NO: 6552 - protein, 60 aa, Enterococcus faecalis
PSGRRFESYKVHCDVVYSFIFIMEDYPSPAEGNGLENRQAGKTVQGFESLILLCSGTKFP

SEQ ID NO: 6553 - protein, 82 aa, Enterococcus faecalis
RFNSIRNNTQCGGDSEKDTPVPMPNTEVKLLSADCSEGFPFVRVGRRHANCCFWRFSSAGRAPALQAGGQRFDPVNLHFLSR

SEQ ID NO: 6554 - protein, 67 aa, Enterococcus faecalis
PSCFYLSILWLSPRPISIGPLQLSLAFHFQPIYLIISQGSYFLKEMGNLILRWASHLDAFSVYPFPT

SEQ ID NO: 6555 - protein, 123 aa, Enterococcus faecalis
KVTEAPKGSLRMVGNHSKSVKAEGSLTARPTSRAGTKVGLSDPVVPHGRAIAQRIKATLGITGLSPPRVHIDGEVWHLDVGSSHPGAVVGPKGWAVRPLKRHASWVQNVVRQFGPYPSRALEI

SEQ ID NO: 6556 - protein, 83 aa, Enterococcus faecalis
RCGKTHWRTEPTYVEKCGDEVWVAEKFQTNLEIAGSLRNSFRASLGIENDGGRALFGLGAHLGLPNSDKLRMPFIYIRESDCE

SEQ ID NO: 6557 - protein, 439 aa, Enterococcus faecalis
  MISC_FEATURE (439)..(439): Amino acid 439 is Xaa wherein Xaa = any amino acid.
LGDVSMKKESMSRIERRKAQQRKKTPVQWKKSTTLFSSALIVSSVGTPVALLPVTAEATEEQPTNAEVAQAPTTETGLVETPTTETTPGTTEQPTTDSSTTTESTTESSKETPTTPSTEQPTADSTTPVESGTTDSSVAEITPVAPSATESEAAPAVTPDDEVKVPEARVASAQTFSALSPTQSPSEFIAELARCAQPIAQANDLYASVMMAQAIVESGWGASTLSKAPNYNLFGIKGSYNGQSVYMDTWEYLNGKWLVKKEPFRKYPSYMESFQDNAHVLKTTSFQAGVYYYAGAWKSNTSSYRDATAWLTGRYATDPSYNAKLNNVITAYNLTQYDTPSSGGNTGGGTVNPGTGGSNNQSGTNTYYTVKSGDTLNKIAAQYGVSVANLRSWNGISGDLIFVGQKLILKKGASSNTGGSGTVGSNQNPSGKDTLLYGX

SEQ ID NO: 6558 - protein, 400 aa, Enterococcus faecalis; identical to SEQ ID NO: 5827

SEQ ID NO: 6559 - protein, 238 aa, Enterococcus faecalis
IYEEREGTVMKNQFKGKQYDYRIIIEAIGLYYHFSLSYRDCAKIMRKFSVGVDHTTIYRWNKEYGKILYHLWNKRRSLSKSWRIDETYVKVKGQDRYLYRAIDSKGNTLDMWLRNHRDTVSTKAFFKRLIRVYGQPRSIVTDKYAPSLKAIKELKEEGILYQKVKHWKSKYLNNILEQDHRQLKGKLPYGNNFQSTYTAAVTIKGIEVVSALYKESRREIGLFDFSPWEEIDTLFKSA

SEQ ID NO: 6560 - protein, 82 aa, Enterococcus faecalis
KALYCKQYKAFYAIIELIVKFNDGGYPIESEVVRMNVLPKSIERRSLLSVSESLQLMLAFGGFTLTLITTIVAILNYKDKKK

SEQ ID NO: 6561 - protein, 63 aa, Enterococcus faecalis
ITYKNSATVFSGAINEGVLPVRPLYIIIIPHFVRKGRRMPTFFHARLNDGGGGSVARMKKQIY

SEQ ID NO: 6562 - protein, 166 aa, Enterococcus faecalis
KIRKKETIMIQLSAVGRLTKGAELRTTTNGKSVANVTLACKRKRPDTNGNVPTTFIQCVLWGKPAQVFAKYTQKGALVGVNGELQTRSYDDQQGVTHYVTELVVEDFEFLESKETVQKREEKQHAVPQGQSTPTVNEQPAMNQAPTQQNVYQQPSMNGLSEYGYNQ

SEQ ID NO: 6563 - protein, 441 aa, Enterococcus faecalis
KTPKPLTPPKAFFNWCTAQIPTYEWQNKKETILASSRKNCPTIKKRLTKYSRLSFPTKFYSFGIILVRAKRIEIQTHSYWQTITDGTETLIYEPSNLERFSNDTHVKAHYENGHWHEGLLANYGYMSSAYTNTVFYPNNWQENLTTNSELKYLKLPVISRQELAHIYKYRNEIEFLQKIGATTLANEILFNDERNVFGTWHKKVDMRIITKNWLKANKQRLKTTNPTFHMLMLEKTLKERKVARIEGIENYLHYSQIKQLPKEVNLTKFQHWFMRKGERFSYYMDYLHMLEELNTPFTDDVLFPKNLQLAHDNATNTLNLLERELEEQQYQERKKQLKALETEIDDLLFLAPHSLQEIVEEGQVLHHCVGSQHYLEQHTKGKTTIVFIRRKEEPDKPYFTLEYREKRVIQVQGKYNRGHVPEEVEEAIEQWQIEIEKAMPS

SEQ ID NO: 6564 - protein, 254 aa, Enterococcus faecalis
GNVMDFQNIQTVKELRYALKQYKQTLATTIFDDTQGYISVAFKKEVIEKDGKNVQFLCFYPNYEVALYPVETLLAYLEKLPEQAIVTIKDHDGNYSSLFLTIDETIDQGNNYQWLVISDKNSYERFFFTAQESTQEQAFEKMLKELETDHDSTLEVVHNWLCRQTDEALFLGILKEDRTLKGAMTYCIGKAQEQSKDQSSAMVADEVVFSWIKEYFLLEKLPETKAVGKVTTKKSETKPERKEVDEQIDLFECV

SEQ ID NO: 6565 - protein, 90 aa, Enterococcus faecalis
KYMRNRIEELKEQARTELNEWGLIIDGCFEGDFETWIGCYARPKDKPTALDPINEEEAKEQAKYAVNGFPQDFTEWYEWEINNGKLKNLL

SEQ ID NO: 6566 - protein, 153 aa, Enterococcus faecalis
RAVHCLLQYHSQSKKQGYINEQARPCFFFMSTVLSRHSERHEHTGENEQPNRKRKRGETTPFDEKKFLTVQLHFLKRLTKMVVQKSKPKGAENMNTPHLTFKLEHARKEHQKLSEAIITNDTVTLLLNYGCLKNANDRLYQLEYFLNHKEWKD

SEQ ID NO: 6567 - protein, 64 aa, Enterococcus faecalis
HCSDIRKGIFDRNALDLHQFIGVLLEEEKLFNHILRAFVFHVGSYLKSSSSLLILRIFQHKFQE

SEQ ID NO: 6568 - protein, 167 aa, Enterococcus faecalis
LGVSFMRRIEKEFNKKLAGYERELKKLGCLDDETGLIPISKRRWHVIWWRPDTPAKTIVRSYRLTLDNENLCILGDVEITIYHDGTYGISKEGVPIFINDLLSLKKLFTIFYGTPFNLNFEKIRCVSFNRYCITIPEIYVEKFEVLINYSMILNSCLHEIQKHVEYD

SEQ ID NO: 6569 - protein, 262 aa, Enterococcus faecalis
QMNPLLYNYFIDETSSKKNMIKVLSLLHELRIISRSQLLLLLNINANVAERTMNQILKYLKDNNLIDKIKKGNQACYFLTKEGHQSIGGYYTLPKVPEYNLQHHLQINDYLIKMLELTKDRKNLKFVLSERRQVFETKDLANNRNRKKYFVADFIFRFRSKENKEVNWSFEIELTMKTRRRYREGIFPKYIAELKRLPYARLIYVTPSPLIEEELERFKGYFIRKEGEDNAEVFDRLHIFSAEEFEQEIKRLLAEDQFINWE

SEQ ID NO: 6570 - protein, 116 aa, Enterococcus faecalis
IIEKNGLKVCLIVCLKVCLKVYLKVCLIKKGGTRPRRLVSKAFSACKIPDHFSATWGEYPSYTLKWSGILQLRKKYQAPRTNRIEKKIMSKVIKNKEKSLKDEVQKINPYPSLGVS

SEQ ID NO: 6571 - protein, 740 aa, Enterococcus faecalis
DNLVQGNNLFNNGLLQPKKPPIGQEQQKMTRYHQLRLVFGLVGVLLYPFAILGSIPLLIGLAVDKKDKAANVFDMDYESFLKRNSIVFLSFSAVLFVINVFAFILWIPRGYLSAYLLFPLNLLHTALRFNWETIVALLIGSSGMGAIFLAFSSFVAKRKVISKEDERKKITESKAYKDREKNKFEESQRFTDEQEEAYEEAVETVDIDKYKELSNQLLLGTSEFGLPYIINFSEFNQHVLVPATTGSGKTTLLQLIVQHAVKFNLPVILIDGKGARDTLESMREIARYYDKEVHAFTDDGDMRYNPVEHGNDVSIRDKLVSLAETESVFYSSAAKLLLENTVQLIDLFSTRDDVNRKLEDIQKYLLPRNVLRLFADKIEEKNPTLYEIEVEVKQAKPKKKSKKNETKVPIIDEEMDEVSEATTPTNDEVTSEDLELEEGDIPPVETEIIVLNPNTLQLDDFYYLLKRNLFYLSKKEKIMFERLFTRYEHKDSPFYLYATSESLQTNINMLLDSELGHLFDTTNAKSVLDVQQIVRDRSLVYVSFNGLIYKEYIRTLAQMLVGDVNYFASEMYRKNVKREVIVIFDEPASYLNEQFIDMVNKGRGAGVHGIFTPQTMADIAKLGDKLMEQLVGNVNTVFIGKTNEKGEAEYWSETMGTYQDIDVTSVTEQEDGYSDVGKSDWSGDRGTKRNVDRFKVNPNVIKSLRTGEFIIYRTAENVNVPPQKVYVRNALEWLRTHNGI

SEQ ID NO: 6572 - protein, 302 aa, Enterococcus faecalis
PLPRGETRRKQAQEERKAAIKKRQEEARKHGKAETGLKQRPLNKEQEKRSALRRELKPRPQHKAPNAIEKAQEGLRQAHEKGRMQEQKSEEQLKRQQHESARQKEYEKDRLKKQESLKKINDQSDESTNLTALRNQNRRTGQRSKKRETGHQTLMKRQGEKVLQPTNKPKDMKKQVVARSPRRTGQPTTRQNIQPKVAAQMVKRSGGTLGSNPAYRRPEVRKKMDQVKQVTQVDVPQTHSTPQRVQPKVNEPITRMNRHNTPIIKKEKRTKQSPVVRRERKKPGTQKITNKPKGVRQPRARK

SEQ ID NO: 6573 - protein, 84 aa, Enterococcus faecalis
GMKVDKRIEAVTKFLESLGTVEDYTEDVAVKYRNLILKSYELYENKYNDTVDDSLCIEVWSNGTYVLTNEDYLMPPRSSPLEVA

SEQ ID NO: 6574 - protein, 156 aa, Enterococcus faecalis
KNWYLVERLNFQTKCRLYFPNKRLAILMEYNYTREFKQPHKIYSIKGVALPFAPNGIRLEQIFVGIGILILLLIFAIISFVAKINFFTTIIANFWLILIVGVGVLVWTLFSLKWDNKSFLDYLIGRGNFLYQKKKRYEHGLLVQFHKEKVQYKVRK

SEQ ID NO: 6575 - protein, 91 aa, Enterococcus faecalis
MECKNMFDLSGLANNISSQVIILLVILGLVSLVVAVATQGAARGIATVCLILILIALVLVLKDAEKIGTWLKDLIFKPNAGFIFPIKGWRF

SEQ ID NO: 6576 - protein, 345 aa, Enterococcus faecalis
KMSNKKAVFNPQAGKQAQKEKVRKETRVSSLVQIIRAIFRKKEKEPENSRTIRFSPRSAKSIYSMVFFLLFFLISLFLLMSFGRLNTLTRLAMQKQVNREEIIESVNKGVAASDQLKYDGMKLVDRLFTVSSKLEGKEYWEAQITPYLAAGLRAEDLGLDKTNDDRVARNVRFIRLETVDYKESLYSLYYDVRFTEGKEWRQVQVILPVSYAENELKLLDRPTLMNLAKTSESNKVVYDEQRFIPKGKEVNEEETKKLTEFTNRFFELYVKNDEKLGLIANVKGLEHATLEKVDITSLRETGQGIYDVRGTYQFSYEGKSPLTSNFSLQIEATKDSYFIKKMNGV

SEQ ID NO: 6577 - protein, 106 aa, Enterococcus faecalis
RLMHENHVNEKETAVENTERIAKNYAYERPAIQTALFILWRVHNKQYQTGARIFYDELEKATKTSKTAYKEALAFLEGAGMVVNEVVVESKVPQSLIQRYGILKDE

SEQ ID NO: 6578 - protein, 138 aa, Enterococcus faecalis
VRKISKKVRITTLISLMLVLGGIILFLFMVKQNEKAMLNQEKERAAVVLADNETRVLFFYKDTCADCQKVYPMVYAEDRGENNIVFINLNQPKNRHYIKTYTLEKVPTFVTPKRRYVGTDTRKIQQLIAENNDERSED

SEQ ID NO: 6579 - protein, 214 aa, Enterococcus faecalis
FYSRKGSVAMRERLKQAQPLVIVLLLVLLTTLGGGYFNEKKENAQIKNQKEKEQQVLKKTLEEKNGQLNDLSRKIEQLLDEKEDPVNEPLTKAVNALFSLVFDYDSSNKEQTVAKRKEKATVYATEQGLSGVFPRDSDKVVPSVVTVSQLDKAPEIYRTTQKDTGKEKTALVRLEYSVRIAGSQAQRGNFIYKVTFNEESKKFTTIENLGEENQ

SEQ ID NO: 6580 - protein, 426 aa, Enterococcus faecalis
ERTMNKKRIVFGLLSFFLPIFLVFGGLLFFLLLLTSTSDTSKNDCIQPSINNPTDATDTPKSIEQFVKSHKDAYLLSWKAGGFLPSASISQTMVENGFNFTNPSGTSFWQAHNMGGVKTSKKEDFPVTLATFGQDSVDISGTKLGSNVGDGTGGAYTWFKDYNAGIVGKAEFMAHQTLYTGAINNTDGLSTLSAIYSGGWATDPTYLMKLQATYNSLGKQFQWLDQEAIQKYGNAPFKKSELVPNIPGKSPITNEKSGKNSDCVVTSDTSDQVTGQNTAPSLEVPSAYKGKLTLPPIDSNDYAGNNYPFGQCTWYAYNRMAQIGKPIEWFSGDGGNGAGWANSARAKGYTVVKGKPSVGWAASMQGGIGGSAPPYGHVAVVEYVNSDGSILVSEANVINQGSGTRSWRVLDRATVEQIDFIQGKGA

SEQ ID NO: 6581 - protein, 64 aa, Enterococcus faecalis
ANSFNGWTKKQYRNMVTHRLKRANLSQIFPENRQSQTKNLVKILIALLLQIHPIKLQDKILPHH

SEQ ID NO: 6582 - protein, 79 aa, Enterococcus faecalis
VRKKREAQRQFFSYSWYAPIYTLAYTLALRFLKMTNPDTTDKIPPTADKKIFISSPVYGKTFILPSLPFTSTFPLGNTL

SEQ ID NO: 6583 - protein, 306 aa, Enterococcus faecalis
WNDRQKKILNLQIKIKMEEIMMKKILFASLFSATLLFGGSEISAFAQEIIPDDTTTPPIEVPTEPSTPEKPTDPTPPIEPPVDPVEPPITPTEPTEPTEPTTPTEPEKPVEPTEPTTPTEPTTPTEPSEPEQPTEPSKPVEPEKPVTPSKPAEPEKPVTPTKPTEPEKPVQPAEPSKPIDVVVTPTGELNHAGNGTQQPTVPIETSNLAEITHVPSVTTPITTTDGENIVAVEKGVPLTQTAEGLKPIQSSYKVLPSGNVEVKGKDGKMKVLPYTGEEMNIFLSAVGGILSVVSGFVIFKKRKAKV

SEQ ID NO: 6584 - protein, 299 aa, Enterococcus faecalis
NLCKGEFMYISFDLEATQAEKIALPVHQRFSLVQGLLLLEQANQEVLATKQGGTIAYFLYTGKEQELPILEAELLLPVKQKDMLDVLLEPVTNDPTLDPIEVKNFLQLVNQSLPKKQRAKSNKKSTEKKATIDTKPVKKKVFLSVSLITLIGLILLMSGFLLGKTNSTPYQEKELEVKKELNTLTEQVNEQNKVETFTRFFLTNYYSGKTDAKTRQAVLKKFVKKETLSDFLSEKSRARSMFPWEVKKKDKQWTIAFIVVLINEKDEQSTKKITFTAEETKEQLVVMERPTEEDFELTN

SEQ ID NO: 6585 - protein, 96 aa, Enterococcus faecalis
CLTQKYRREKMIILSGLFILGIGIVGGYQLATLPKLIEMKQHKAIQNHFNVKGNEYTYYQEDSENYILSLEDTEYRIKFSKNTPLKVVFTEILEPM

SEQ ID NO: 6586 - protein, 135 aa, Enterococcus faecalis
VKETEKPMYVSFILSCLLGFSGYSLLNRLNSLEFVDAWLDKETQKITLKRCFYDTSFKKQTLKELERVYFQLKEIINVQINKRSLNTNDIRNVRELEEKQQEIKRFMLDVLEDAYWKELANMPEDQRHLDDWDFF

SEQ ID NO: 6587 - protein, 137 aa, Enterococcus faecalis
RRKEGRTDCPSFFSYGGEKLEAVVAEREAKGMKEIAIQEKDLTLQWRGNTGKLVKVRLKNTRAMEMWYNKQITEENIQEITTLNIIKNGKSLALEVYPEKSIYVKPNLGRINVPVFFIKTPINRGVFEEIFGETLKA

SEQ ID NO: 6588 - protein, 1308 aa, Enterococcus faecalis
YMNQQTEVKKRFKMYKAKKHWIVTPILFLGVLGAVGLATDNVQAAELDTQPGTTTVQPDNPNLQSRNETLKTAVSEEAALQKDTTSQPTTAEEVVPKGIAAEQSSATSNDTTNVQQPTAEAEKSAQEQPVVSPETTIEPLGQPTEVAPAENDANKSTSIPKEFETPDVDKAVDEAKKDPNITVVEKPTEDLGNVSSKDLAAKEKEVDQLQKEQAQKIAQQAAELKAKNEKIAKENAEIAAKNKAEKERYEKEVAEYNKHKNDKGYVNEAISKDLVFDSSIVTKDTKIDKITGGKFIKASDFNKVNQGQSKDIFTKLSKDMNGKATGNFQSSKVSAVEFGPKGGYAVLLEKNKPVNVTYTGLNASYLNRKITKAEFIYELQSAPSQSGTLNAVFSNDPIITAFVGTKNANGKDVKVRLTIKLYDANGKEVLPEKDHAFAYALSSLNSSLGTNYSVEHAEFVSDFGSKNEFKYINGSYVKKQADGKFYSTEDLDYGTGPSGLKNSDWDAVGHKNAYYGSGVGLAREGGRISFSFGMTTKGKVNLSGAQWFAFSTNLNAKSIRPYQKKGNPKEPEKATIEFNRYKANVVPVLVPNKEVTDGQKNINDLNVKRGDSLQYIITGDTTELAKVDPKTVTKQGIRDTFDAEKVTIDLSKVKVYQADASLNEKDLKAVAAAINSGKAKDVTASYDLNLDQNTVTAMMKTNADGSVVLAMGYKYLLVLPFVVKNVEGDFENTAVQLTNDGETVTNTVINHVPGSNPSKDVKADKNGTVGSVSLHDKDIPLQTKIYYEVKSSERPANYGGITEEWGMNDVLDTTHDRFTGKWHAITNYDIQIGKETLKAGSDITKYIELTNKDGQDLTFTMNQALLAALNEGSNKVGKQAWSVYLEVERIKTGDVENTQTENYNKELVRSNTVVTHTPDDPKPTKTVHNKKGEDINHGKVARGDVLSYEMTWDLKGYDKDFAFDTVDLATGVSFFDDYDETKVTPIKDILRVKDSKGVDITNQFTISWDDAKGTVTISAKDPQAFILAYGGQELRVTLPTKVKANVSGDVYNSAEQNTFGQRIKTNTVVNHIPKVNPKKDVVIKVGDKQSQNGATIKLGEKFFYEFTSSDIPAEYAGLVEEWSLSDKLDVKHDKFSGQWSVFANSNFVLADGTKVNKGDDISKLFTMTFEQGVVKITASQAFLDAMNLKENKHVAHSWKAFIGVERIAAGDVYNTIEESFNNEKIKTNTVVTHTPEKPQTPPEKTVIVPPTPKTPQAPVEPLVVEKASVVPELPQTGEKQNVLLTVAGSLVTMLGLAGLGFKRRKETK

SEQ ID NO: 6589 - protein, 72 aa, Enterococcus faecalis
KISLKLNNKVKGATYFAPFYCNHWNKLKNKKIANQNGWLIVLKAEESTKFRSQPVSAGQQKINGLSRMETLK

SEQ ID NO: 6590 - protein, 928 aa, Enterococcus faecalis
QLQRYNNGVKTMGIPFTIKIIRNEESKMKKFASAGLSILVATGVAGIGGNEVQAAEQAQPKTPENSSTEQPTVKATETTEQAITEKQQQVTEKQAIVDQKQQVADTAKKEKDAIDQSVKDQQAVVDQNKDALDQSQQAVTDQQAVVDEAKKVVDEATPSAIEKAKEQVATDTQAVDEQQKVVDQAQTDVNQQQAVVDEKAKETNAAKVQNEKDQQAVTAAKQEQAKLEELAKNAEAEKAKAEKEQAAKEAELANKQKEEAKAKDQKTKDDQAVADQQSVVITSQEKVADAKADTAAKQADLTAKENVLKDKQAATKQAQNTLDSSKEELKGHKGINLPANFTPDYYKKLSEQEKQAMEKEALALNKVFPENQADAAKATEMINVKNPTEKQKQQMSDYVVGLINDVREKLGLQKLKISNQAMKFAWDVAKYDNPKEFDHDVNAINRAAKENGFKEYPGQNFYENLSMGYFETINGTISQLEFEKAARKTIADMLFDDESSAYSHIDSLLKGDTTNMAVSISGDLNDISAKIHIISYNQSKLVEANTYEEGTAPVFKSKETLQKEVATNQEKLATAQQAESDAQQAKSASQQALNTAKTTQATAEKELSVHKATLANLQAVATKSTTNYEEKVRQTATAEKSLQQTKDQLATINELIQNRAAVLEKAKTNVAEAQAIEQTSAKVLKEKQAAQRAEEEALKSLQEVLAIAKETLGKKQAQLKVSEQALSRLENAQPNYEKAVKALEKAKKTLVHAEEAYTISLKSLEELKEQQTVATLAYTQAQEDLANAKLELQQYQGILRDLEAQQAEQRRQEALQEQVAKEQQRLERESKQQQTLVASATSADKTPGLQQLSFSKQKEQPKAQALTHSESRKTKQVAKAPDSLPHTGEKNNKWLAIAGLILALLGAAGIISFISRNEKKVKNIFKIK

SEQ ID NO: 6591 - protein, 103 aa, Enterococcus faecalis
ENMTKKVQNIWRKEMLALMNEDADWYRNEDTERFKRIQELAKKIETASTRQFSSHISKERFEAYQRMGLQFKEIAEEFHITTTALQQWRKDNGYPIYNKNNKK

SEQ ID NO: 6592 - protein, 91 aa, Enterococcus faecalis
VVNLGFYTWSFCLLVLTNMRNSPIARLAIEKGCRKAHGHEGENWLHVNFFAEFGRSLKNEYYRTYLVNQRVFKGLGKDKLPKEYGQNKGGT

SEQ ID NO: 6593 - protein, 372 aa, Enterococcus faecalis
GIKKCVLFFLTCLRDNSGSFKKITKKETTYMKLSILDQLTVPKNQSASDTLQEAKELAQLAEKLGYTRIWYAEHHGSDAFASATPEILVAHIASATEKIRVGAGGIMTMHYAPFKVAETFKTLAALYPDRIDLGMGRSPGGSPLTTLALNNGQPPQLDQFDKLPEILLFLREEFPENHLYSKISAVPREVLLPQPWLLGASKESARSAGEYGINFSFAQFIHGHLPKEVLSAYYKHFRPVTEQQEPQVSAAYFTFAADTKEEAEYHAASFEHYIFATKHGLPNKILSPEKNPTFPLKWKGTNGFKKKINNALFLGVNQKIGGDFPPNKKKMGLKKKQGLPPPVFEKKKRAFPFVGNPFPRNIFLKGELKNFL

SEQ ID NO: 6594 - protein, 231 aa, Enterococcus faecalis
KILRYGFLMLCVKMEHMYAISNWKGDNMYEYIIGKVTFVSPYYIVVETNGIGYQISVDNPYRYSGKMDTDIKLYLHQVVREDAQLLFGFGSLEEKQLFLKLISVSGIGPKSGLAIMASVADHGGLINAIEGEDVTYLTKFPGVGKKTAQQMILDLKGKLGELESSEAAVAAMTATEAVTTSNQALAEALEALSALGYSDREIKRITKQLEALGETTTDVYLSNALKFMMKR

SEQ ID NO: 6595 - protein, 342 aa, Enterococcus faecalis
GGITMTEEERLLSAASQEAEASIEKSLRPQFLAQYIGQDKVKQELTIYIEAAKNRNEALDHTLLYGPPGLGKTTMAMVIANEMNVNIRTTSGPAIERAGDLVAILNELEPGDVLFIDEIHRLPRVVEEMLYSAMEDFYIDIMVGQGTTAHPVHFPLPPFTLVGATTRAGMLSAPLRDRFGIISHMEYYQEQDLKEIVLRSADIFQTEIFEEGAFEIARRSRGTPRIANRLLKRVRDFAQVQSDGKIDRAIADKALTLLQVDHQGLDYVDQKLLKTMIDLYGGGPVGLSTLSVNIGEETETVEDMYEPYLIQKGFIKRTPRGRIATPFAYAHFGYDYLEGRKN

SEQ ID NO: 6596 - protein, 158 aa, Enterococcus faecalis
LYHDTIIHIDKKEVIKLTEYIYLASEQPLSTGSITLNGLSKPTGNLLNKAFFFFINDFEGDPPGKFSYSNYLKTLNYQVCSMCSLPSDNQNIETPSAIALLGYIRNHFKNTCTTKLYILSALNGFENKPISKTVTRKLSDLSYKDLYYQEMKLLKIIR

SEQ ID NO: 6597 - protein, 283 aa, Enterococcus faecalis
GEMLNGNKRKQALTACFLLFHVKRLFLFRRAAYFSCCSYTVFVIAFKLEGSMLNKEIKGALIVSCQALADEPLHSSFIMSKMALAAKQGGAKGIRANSVVDIRAIRKEVDLPIIGIIKRDYPDAEVYITATMREVDELMAVQPEIIALDATHSKRPNGETLATFFKRIKEKYPNQEWMADCSTLEEMIEAAELGFDYIGTTLVGYTPQSENQRIEQNDFELLREAKKHFTTPIIAEGMIDTPAKVQRVLELGTYSVVVGSVITRPQKITEKFVEATKIKQNQA

SEQ ID NO: 6598 - protein, 826 aa, Enterococcus faecalis
SIHFDTVAFFLEKVESFNNKKGYTPFGIVLADNKSVYKALSFYRRGFMKGLSKKKRVSTWLALGITVVSCFALSREVQASVERTKVDEFANVLDVSASPTERTNGVYDTNYFNNFSDLGAWHGYYLPEKSNKELLGGFAGPLIIAEEYPVNLAASLNKLTVKNKKTGETYDLSQSNRMDLSYYPGRLEQTYELDDLTIHLALIFVSNRTALIQTTLENTGEEPLSLGASWTGAVFDKIQEGTETLDIGTRLTAKDNDIQVNFGEVRETWNYFATKDTKYTIHHADKVSTKIDNRNYTATAEPIELKPKQTYNTYTTESYTFTKEEEAKEQQQAPEYTKNAARYFKENKQRWQGYLDKTFDQKKTAEFPEYQNALVKSIETINTNWRSAAGAFKHDGIVPSMSYKWFIGMWAWDSWKADVATADFNPELAKNNMRALFDYQIQKDDTVRPQDAGAIIDAVFYNQDSARGGEGGNWNERNSKPPLAAWAVWHIYQETKDKEFLKEMYPKLVAYHNWWYTNRDHNKNGIAEYGSMVSDAHWQKDDKDQIIKDKNGQPKVDDDAVIEAAAWESGMDNATRFDKEGVGKGDVGVKVFENKNKGKVVGYSINQESVDLNAYLYAEKGYLASIAEELGKKEDYKNYQKEAKKLKKYIQENMFDEKTGFFYDLQINEDGSKTKLLVNRGKGTEGWLPLWAKVATKEQAAAVKKNMMNQEMFNTFMPFPTASKDNEKFAATKYWRGPVWLDQALFGVEALQNYDYTKEAKEMTQKLFLHAEGLMGEGPIHENYDPLTGKGLSTKNFSWSAAAYYLLYKNTLLSNNPTTQTAFEIK

SEQ ID NO: 6599 - protein, 309 aa, Enterococcus faecalis
KGDIMDVLGALKYFRKKKKIAQKDVLPKKGKQTYRRIEIGEAKLSYEDLMTALQSLGITFNEFFFMVSDTRIMASSEVKHQIECCQMGLNNTSEKKNLIHYFYQLERNPHKNALEMSIYTDIKLTFSNDWEEIPEFDETDRMVILALISSKSYYTYYDYQMVTNPAALFSENEVLQILEQMFPVKDAELRDTQTLNVAYGFYLNIITGELYKKNYAKAREYLALVSVTTIPAEIYYIHFNLRYLKNLTYYLYTGKMRYYKEVIAVIDMIESFGDARLAEGMKKEMLQLTAGRTFNLEKGQFPLNIVTEK

SEQ ID NO: 6600 - protein, 238 aa, Enterococcus faecalis
IRKKPNRQKQKYLEIIEELPPMRNVLQDYLDEHSFRVVVKKKKNYLTYEGLQDRYAYILKSGIIKTSVISKDGREFNLRYINNLEIVSLLRDEYSEFIDAPFNIRIESPQAELYQIDRVQFWRDINNSKDLQMYVKEYYRDRLMHSMKKMQQMLMNGKFGAVCTQIYEMYDSFGVETEEGILIDFVVTNEEIAHFCGITSASSVNRMMQQLKELGAIELRNRKILIKDLDMIRDNIIV

SEQ ID NO: 6601 - protein, 306 aa, Enterococcus faecalis
GNSRKGGDLMTEPNLKDPRKLFYSDGFPQQDQETPALQDKMVPKPDCGEDSYVGNHKLENRRVLITGGDSGIGRAAAIAFAREGADIALHFFPGEEKDAEEVAHYIREAGRKVVLLPADLRDKQAPEELVAQAHEALGGLDTLVLNAAQQISCAAIEELPMEQVIDTFHVNIIAMFGIVKAAVPHLPAGSSIVTTTSVQAFNPSEHLLDYAATKASIANFTVGLAKQLAPKGIRVNGVAPGPIWTPLQLDHGQPIEELPEFGQHSLLERAGQPAELAPVYVFLASNDASYVTAQVYGVTGGEAINL

SEQ ID NO: 6602 - protein, 194 aa, Enterococcus faecalis
EGCSVNKVVKILLLLGSLILMALFGAVAITTWSADTAWQPPDNVQWFLQDNEYARQAIFWVALVLLGIMLFLFLFILLFPRRKGTFELKEEQGKLVLHRKAIEGFVRSSLQDSDFLEAPTIRVKATKRRIKVNVKGTLKRTADLIGQTEAWSKTMEERLARLVGTGHKITIDVHFEDIQSMKRPQQQQTQARVE

SEQ ID NO: 6603 - protein, 67 aa, Enterococcus faecalis
EGCTMVEWIKQYAVPLIGGLVGLVFAILFLSIGFFKTLLVVLLTGLGIWLGLYLEQTGIVKNYFHHK

SEQ ID NO: 6604 - protein, 174 aa, Enterococcus faecalis
EVLAMENANVSIVKGELTFEDKVIQKIIGIALEEVDGLLTVDGGFFSNLRDKMINSEDVTTGIHTEVGKKQVAVDMDIVAEYGKDIETIYDQMKEVITREVQQMTHLEVIEVNVNVVDIKTQAEYQEESETVQDKLGNAAEATGSFMSKQTNKAKHAVTKGKTKVKENTAPRVQ

SEQ ID NO: 6605 - protein, 187 aa, Enterococcus faecalis
TMSNEKFNNVPKPAGNGPHTPEDHAIKGELTFEDKVVQKIIGLALENVDGLLTVDGGFFSNIAEKLVNTDNVTAGIDTEVGKKQVAVDMDIVVEYGKDIQDIYEKMKELISREVKKMTHLDVIEVNVNVVDIKSKEEYEEDSETVQDKVTGAAKSTGEFASEQTEKAKKAVNKGTEQVKENMEPRVE

SEQ ID NO: 6606 - protein, 85 aa, Enterococcus faecalis
REETIMGFIWALIVGGVIGAIAGAITKKGSSMGIIANIIAGLVGSTIGQAILGTWGPSLAGMAIVPSIIGAVILVAIVSWILGRK

SEQ ID NO: 6607 - protein, 426 aa, Enterococcus faecalis
QHKINRTKERGIQRIMTEQTPTKLLNKGFISITVINFIVYLVYYLLMVIIAVIAQDSLHATLGQAGLASGIYIIGTLLARLFMGKLLELIGRKQVLRYGALFYLLTTVAYMYMPSMGILYLVRFLNGFGYGTVSTATNAIVTAYIPKNKKGEGINYYGLSTSLAAGIGPFIGMLLLNVSNFHVIINFSIILILLTTIACFIFPVKNIELTPEHREALSKWNFDSFVEKKVLFITFIAFLMGLAYSSVLSFLSSYVKVIDLVDVSTFFFIVYAVVITLTRPSTGRIFDVKGERYVMYPSYIFLTLGLFLLSMTTSGWMLLVSGGLIGLGYGTFMSNGQAVCLQESPSPHRIGIALSTYFIGLDLGLGVGPYVLGELRNFMSFQQMYFLAGCIPIVCTILYMVFHKAKNDAKDLSLETIEEIEHGSEL

SEQ ID NO: 6608 - protein, 72 aa, Enterococcus faecalis
TRLRTINGQGVISMPNDERILNVLQQTLTEIQRMNTRLAKIETELADVDQHHATLDHYLQELELVTENNNVM

SEQ ID NO: 6609 - protein, 155 aa, Enterococcus faecalis
DLCHDCQSICARKLFKRSTSKNPSLYKDVKRLTIEMLPTLIGNEKLLVDCLFILFCTLKTKSLPPIRVLVRTNQSNLILDTLYEKLSKAVDKKLIFVASPEKPFDVIITDIFSEVSVKSTVPTYYVDFSASIGELAQSLENLNTQIVTKQSPRHF

SEQ ID NO: 6610 - protein, 378 aa, Enterococcus faecalis
IAWGKQFGGNRMLTGLLDVPYRKSFALLEELLERREAEEQTLAISTLATQLKMQQNTILQSVALLQTEIEKNGWENLFSLSANAKEITFWFAPYFQLSFLMPYFVKKSFAYQVLTYAFNHNAIDSKHFEKVLEISSSTFTRKIGQLNQWLQKYQIEINLKRTNVLVGKEKDIRIFFMMLFWNNYSEGDWPLHTITKKEVHSLFRRLKHSVSFNTTQDFTKDLIFSAVILARWKEGFFIKETFVEEEAIVNPFVNLSEFELFFKEEALHQVPTKFIQKEGLFAFFLLTISVSYATQDVLEIPAARMHMVQLLGSPIKEIIYQLTSFYQIKLTFHEYLYLYTSIQNLSVFFKTFVTIANPFVQESFLKEALQKIQVSTKM

SEQ ID NO: 6611 - protein, 502 aa, Enterococcus faecalis
PIRKVVIMYNLLTKQEIQLLSLIEYLYDSKEKVPMQVLRRKYEFSHYNINNLLNQLTLLISRVNTHENVHIRIINNQQSIELVADENIPIELMKEAVVRGSLTYMLALDLLLKRYTSAKDFCEEHFINFSIFKQVSDRLNNHLARFNCYLNLKRREKICGNEKDFRSFFYSLFFISGTSLVPFLSKTNQAQLQNFIEIIKNRYPYFTYTDLRKLKLIMSIGLLRYQSGFTITNYPEVAAINLAFPYSEFQLLVNDCFIDEQKEPDTWQAEIHFYYDFFSTLTMYSLVQMETINFANLAIMGMDNSPHATWIFEKCTQLQLDLSAIEVVFLLVNLSNASERLIHFPVEEELSYEVANVSLYEKQYPNVSRTTNYFLKRLPFDKQHPLDALFKETIFLIIRSVLLNKQIPVKILLHSSINQIQENWLAKEINNYCDVPLKFVNHIQEVPDLVITDKNNPLFHASKTFYWHPVPYLDEYYNLKQVVRKIYFAKLRGENSLEGIGC

SEQ ID NO: 6612 - protein, 2054 aa, Enterococcus faecalis
NKKLVRSERSLLCVVSRGRMKEMRKNGPMVNRWLYGLMCLLLVLNYGTPLMALAEEVNSDGQLTLGEVKQTSQQEMTLALQGKAQPVTQEVVVHYSANVSIKAAHWAAPNNTRKIQVDDQKKQIQIELNQQALADTLVLTLNPTATEDVTFSYGQQQRALTLKTGTDPTESTAITSSPAASANEGSTEEASTNSSVPRSSEETVASTTKAIESKTTESTTVKPRVAGPTDISDYFTGDETTIIDNFEDPIYLNPDGTPATPPYKEDVTIHWNFNWSIPEDVREQMKAGDYFEFQLPGNLKPNKPGSGDLVDAEGNVYGTYTISEDGTVRFTFNERITSESDIHGDFSLDTHLNDSDGRGPGDWVIDIPTQEDLPPVVIPIVPDTEQQIDKQGHFDRTPNPSAITWTVDINQAMKDQTNPTVTETWPTGNTFKSVKVYELVMNLDGTIKEVGRELSPDEYTVDKNGNVTIKGDTNKAYRLEYQTTIDEAVIPDGGGDVPFKNHATLTSDNNPNGLDAEATVTATYGKMLDKRNIDYDEANQEFTWEINYNYGEQTIPKDQAVITDTMGDNLTFEPDSLHLYSVTFDDKGNEVVGAELVEGKDYKVVINGDGSFAIDFLHDVTGAVKIDYKTKVDGIVEGDVAVNNRVDVGTGQHSEDDGTASQQNIIKNTGAVDYQNSTIGWTLAVNQNNYLMENAVITDTYEPVPGLTMVPNSLVVKDTTTGAQLTLGKDFMVEITRNADGETGFKVSFIGAYAKTSDAFHITYTTFFDVTELDANNPALDHYRNTAAIDWTDEAGNNHHSEDSKPFKPLPAFDLNAQKSGVYNAVTKEITWTIAVNLSNNRLVDAFLTDPILTNQTYLAGSLKVYEGNTKPDGSVEKVKPTQPLTDITMEEPSEKNQNTWRVDFPNDSRTYVIEFKTSVDEKVIEGSASYDNTASYTNQGSSRDVTGKVSIQHGGESVKKGGEYHKDDPDHVYWHVMINGAQSVLDDVVITDTPSPNQVLDPESLVIYGTNVTEDGTITPDKSVILEEGKDYTLEVTTDNETGQQKIVVKMAHIEAPYYMEYRSLVTSSAAGSTDTVSNQVSITGNGSEVVHGDDNGDVVVDIDHSGGHATGTKGKIQLKKTAMDETTILAGAHFQIWDQAKTQVLREGTVDATGVITFGGLPQGQYILVETKAPEGYTVSDELAKGRVITIDEETSAEGAQPTIIKNDVNKVFLEKMDEKGKKLVNARFKLEHAVTTPFTHWEEVPLAPDRTNANGQLEVDSLKPGLYQFTEIEAPTGYLLDTTPKRFIVTQNTSGQIRDVHVKMLNYQGSAELIKKDQAGNPLAGAEFSVLDTTGQAVREHLVSDANGKVTVTDLAPGKYQFVETKAPAGYLLNTEPSAFTIAASDRGKPATVIATANFVNYQGTAKLIKKDVNGHLLSGATFKVLDAKGETIQTGLTTNNQGEIVAEHLAPGKYRFVETKAPTGYLLNTTPVPFEIAEKNAGKPAVVVASDNFVSYKGAFQIVKTNSADQPLAGAVFELYDHNKQSLGITATSGKDGKIIFRDLAPGTYYYKEIKAPKLPDGADYIIYPELVKVEIRGDFKGDPEIFQLGAFANFKGRAVFKKIDANANPLPGTIFKLYRIENGEKIFEREVTAEKDGSLAMEDLGAGSYELDELDATDGYIVNKQPIYFVVKKNSNDKQPLDELEFVNYQAEVMGRKVNEQGQTLAGAVFAIYNADEQNQPQGSPITFLNRAGEKVSEITTDKTGEIYAKGLNEGHYVLVETKAPTGYLLDTTLHPFDVTAQLGKEQPIALGDLINYQGTAQLTKENETGEALAGAVFKVIDETGQTVDGQTNLMSDKQGKVIAKNLAPGTYRFVETQAPTSYLLNETPSASFTIAKDNQGKPATVVLKAPFINYQGAAKLVKIDQQKNALAGAEFKVTDAETGQTVARSLRSDNQGLVQVNHLQPGKYTFVETKAPDGYQLSKQAVAFTIAATAKDKPELVNAGTFVNEKQPVSKKTKPNQPTTKQAARETGWLGLPKTNTQVNYFFVFIGLMLVGLASWLFYKKSKK

SEQ ID NO: 6613 - protein, 309 aa, Enterococcus faecalis
RYEDRMMKKMMVLYNETSGSSESKEIAERFKKAAEARGEAVILQPSNPDIDPEEMRKNAKENQVGVLVVIGGDGTIHHAVQNFKDTIRDYQIGIIPGGTVNNFARVLSIPLKEEDAFETILAGQTTPVDFGMVNQDVMISTLTIGLLADTAANVTQQEKQKYGPLAFTKQFFRLLMKKKKYKLKIDGDERRWHGKAQLLTMTMTNSAGGFTNFDANATPDDGEVHIIILPKLVFYKFVYYLPKIIRGQLNEIPGVVYFSGSQFKISGEKDKKVQTRTDGDPTDDLPIKVTVEAGGLNVFVPETSTSTKE

SEQ ID NO: 6614 - protein, 502 aa, Enterococcus faecalis
TVKWDEYVDIFDTDVVSKIIILRNLPINEGWIDINELAEELQLNKKSVKKYVELLKDDITYYVVDNDASLAFEKGHGYRLNLASSQAFQKLYTAIFRDSLTYQVMEDLFWGRFNGIVPATAKYHTSDATIRRLLKGFTEILAPLGLVINKSTWKIEGNEAYLRHFAYTIFMDLIRDTWPFDYIQETEVAQTVQKMMAFFNVEVAETVTRRVKYMVAISKVRSAQGAEYRPSAEQETYLEGNKHYQAFIEEMTATTLFLNKNDLTFVYFFLLANDQFYQDEATAQAILAHFDETEAPVYMLTHLVQHFLLEEIHMTPQLEKIRPQIFYYLFATHLFAELYYVQNVKMYNVFWNKIKEKYPVLLAELIQGLNQLYEQTGNELFTNKEFLALRYSSVLALSNDLIHREQKIVLGLKSGLPVLEEERVKLSIENNFRRFYALEVLRYSEASKEEWQNIDLLLVTSLADVETGHPEIFLFSSELTFEQYNRLNQKIVKINEKRTTSL

SEQ ID NO: 6615 - protein, 99 aa, Enterococcus faecalis
GFSQEFFYIIERAREGRRDKMKKQMEQIEEILSCEENSAGIRLKELVEALELEVTNQNLLKVTSILHMNPKFKKIYAYEDSRVITLYQLLQNKPLEVTE

SEQ ID NO: 6616 - protein, 654 aa, Enterococcus faecalis
  MISC_FEATURE (646)..(646): Amino acid 646 is Xaa wherein Xaa = any amino acid.
AVGSNGMKRGKHMKKTMLILLFGLLTVVGLPMVTEAVEPVNATDTTIFGAQAMVPNSTEDQTDKLQTLLSQTAKEGRALFLPQGSYALSKDIAISSNYQLIGDTTGATILHNATGAPIQLTDTTYGTKTNVRLQNIAFDGINVTLKLTNQLTLANNIFYNPLKGFVVNLNADIGVKISGNIFMRDTAHMQSGGDFNRAIYIGGYSTPSRFQYMSDVDIVDNLFGLKVTELDAIKSTSRSDLAATITRLQTAIEAGAISVPNEQNYLSTGVNSFNMLKDVTVQHNFFYSPYDNENLNGLVGDHAIYFRGAQNITVVGNHLRRLQNGPAGGFKFKSGRNITIMNNYLRNTGLIMYGTPEIGLAETQAEGAISELSNWLVANNIFDWKYWDNQYAIGMEYNRHTGNNNVFNGVFINNQFVNYHNIPQNRRRELLIASGGGFRPETSFVKDNTRDDGLKNGQLLVENWTEADYRLMPATWESLISPTLYEQYKNTPIPVRNTLATPVATTIVQGQSIDPQQLVANTNDADEAVPAAKIVNPEVLNEIGQQKVTVQLTYETGSLVTVNVPVTVEAPAKKLDLSQLQTVYASIGEANQYTVYSWQLFTAIGPKTIVPSYYQQATQLLAEGQESQDKTQEQVDQLTSNLQSVXECQSSPRV

SEQ ID NO: 6617 - protein, 247 aa, Enterococcus faecalis
YMEWSFPWLSIDGDRMYDDSDFSKFFEGLFSYGVSLTTANALKVTASPNGGMKVQVDSGYAFVGKVFLNSTTKALSIDVASSMQDRTDSIVVRVDKSVRDVFLAVKKNDTTVTRTSDVYELQLATIRVPRNVSSITGDLITDKRADTKVCGYSSPFQKVNVSGLEEQYGTILKKIAEANKTSYEKILNDFKNYVAKAQTDMDSNIEEIIQSGNGKVSAFDVLIHEWFAALKNELDTNQASNLQNQIN

SEQ ID NO: 6618 - protein, 370 aa, Enterococcus faecalis
LPAVGRWCVMELEIFTQDRDNQWKFISEKVFDGFKSLTVKLNYYTYSTFELFVGLTPENIQIFVPDTVIYMEGLYFYVDAVVVDDQATAQIKVSGKSLLGKSLDRIVYRIYNKTAPPEQIVWEHLNNEVVNPSDVKRKIQYLKLDSRANLGNTSIQYQNSYGVVAEEVETLCTSYDFGIRETATKLGVPGNTLSIFKGRDVSRTIEFSDEYENLTKAGYQNNNFDESSTAIVFGEGEGSERKSVVVGNEKTGLQRKELYVDARDLQKTTDEVTLTDSQYLEVLKNRGNNKLSERKRILTLSGEVPTSSKLFKLGEDYQLGDTITIKSNLYNLKKTSTITTIKKTYDSKGLFIEPIFGKETPTIFDVLGRE

SEQ ID NO: 6619 - protein, 295 aa, Enterococcus faecalis
EVGWMYELIYKNSEGSLISFGVQPPFTVKSKTGFGAVENKIITEEQYGLDGVIKVSERLDKRDLTIKGEIIARGTKDLFNLQHEMIKTLNPKTPGTLIYRVFDREFQIDVLVVKAPDLPDPAKNITQAFTCTFLALDPYWSDMSKYNTLIPLAVATKKHMWPLEITKGYEFATLKSGEIVPVTNDGDVSVGGTFYFSLGAEATDPEVYNVITQEFFRFKGSFEAGTKFKLVTTRGQKEAIMTDPNGVESNAMPLRDPNSTFLQLEKGDNYFQVKATTGIGNVIVQLDFRPLVGGV

SEQ ID NO: 6620 - protein, 1052 aa, Enterococcus faecalis
GVLMGEIFKLFGTIGVDNGEANKALDETESKGQSTTSKLVGFFKKAALAIGAAFAVEKIVNFGKLSVEAAASAQALNAQFTQVFGKLEPLAQKMVDGMGKKMNILPNRIKPTFSRITSMFKGLGLDTEAAMKKSEQATTLAADAAAFYDVSLEDASSSLTSFLKGNYEAGEAIGIFANDTQMAQFAISQGVVGSTKDWQNLDEATKQATRLDYASNMLKQAGAVGQAAREADGYENVMGNLKQAWQDFLAKIGTPILGTVVSIIQSITKGLSGLGDKVAAVIPDFGGFQKSAMDAFNGIQNSGFVMNLQWAFKWISDAIKNVAQIVQKELPEIKGIFEDTGSQVSMIFTKLAGVFSTWSITFADIFTAVVPKAIEIFKSAFKTINTVVLPAIEKIVEVIWDISGAVSEVIVNNVIPAFSNFTKAITKNKAIFSSLKAIIVGVGAALATYKIIMKGVLTATKIASGVTKAYTAIQTAFNAVLNANPFVLIISAIVGLVAALIYFFTQTETGQKIWKSFTKFLVDTWNSVKDKAVEIFNGIADFIKNTWDSIVKTASGLKGSLVKTWNDITAKVSEIWKKFTDAGKKTFDGFKKTVENVFNGIKNFLQTVWNVIYAVVGAIIVNTINIWKGIFDGFKAYFQYLWDLIKAIATGVWEKIGDTVTGIINGFIGVIKGIFDAFKTFFQQIWDAVVYSVTIAWNGIKNTVTSVSTAIKNFVTPIFNAIKTTITNVFNAIKNTATNVWNAIKTTISNVVQTILNFVTPIFNTMKNTITNIFNAIRNTASSVWNSIKTTISNIVTSVKNTVINIFNALKNSITNIFNAIRNTASTVWNSIKSTVSNIVSATVNTVKNLFNGMKNTVSSIWDGVRNTISNVVNAVKNTISNVWGGITGTVSNIFNGVKNAIDGPMNAAKNLVKNVVDAIKGFFNFNISWPKIPLPHFSISPAGWSAGDLLKGKIPSLGIEWYKDGGIMTQPTIFGMNGNNAMIGGEAGAEAVAPIDTLLGYVETAVRGVMAEQKDGDINVTQYITSPEPLTPREIARETKYKLQDLATLRR

SEQ ID NO: 6621 - protein, 245 aa, Enterococcus faecalis
GSGIFGQLILKLKKPLIASTTFFTRFLAAFIGPSIAFFTPLKILETVPVIPPHTFEIVFFTALTTLLIVFLTPSQIDETVFFIPLNKFLTVFTVALTILDTVDLILFHTVDAVFLIALKMFVIEFFKALKIFITVFLTEVTILEIVVLILFHTLEAVFLMALKMFVIVFFIVLNIGVTKLRIVCTTLEIVVLIAFQTLVAVFLIALKTLVIVVLIALNIGVTKFLIAVETEVTVFLIPFQAIVTE

SEQ ID NO: 6622 - protein, 115 aa, Enterococcus faecalis
FFLFYRQLIEIKDGEHRIKDLLFKRYGDPISLLRTYRLCDLMEFIFYVQEVEQEEKIYNQWLHTQMTQSLKEFKDQQKYRPLRKNKAKSTTKEEQQKALDFASQFVKPRKEGEVS

SEQ ID NO: 6623 - protein, 161 aa, Enterococcus faecalis
RTAYQSFFFTWRNNKMTLEMRELKGDDLFTLLAIIGKLDVKDEFINLFEKNIESAEKVVPLDHKSKEPTKAEQKKIDAAKEKADKEATKRGIEMGAAMLQKVMLNLKDIKSDINGLLAELTGVSIQEISALGLKEYTTLLVDFFKKPELADFFSSIASLLK

SEQ ID NO: 6624 - protein, 216 aa, Enterococcus faecalis
RSIGGKKNMALPKTGYTKTTADNFVIDSATVFTDFKYDKEKEEFTGIPMGATSGGVEIKTELSYRKVEVDGAYIMDVVGLNVLESATATMKANLIELTAENLRRSLNATMTDATTDEAPAGYKIIKPKRYLEEGDYIPNMAVVGIHNGTKQPIIVALDNGLVKSGLEIKTEDGKEVVIEQEITANASYEQLINDEFPFRIYYPSTSKNPIELTESL

SEQ ID NO: 6625 - protein, 128 aa, Enterococcus faecalis
VMEEFIRELVRILQEIHPETFLETNPRKEVIYPYATFDFDSEPIRRNQDGFYLDIDIFDKNNSFLNLLVLEDKFKTALCYKRVLTPELNLIFSFQGSNKIPTKEELLKRRNVRFYVAVDWRKKEYGTT

SEQ ID NO: 6626 - protein, 143 aa, Enterococcus faecalis
VAKNDFKFISYKDKVKKELDATAERGMTKVLMIIKAAAKSGAPVETGQLRDRIDYQLKAVGGKVVGIVGSPEQYAIYVEFGTGEFAENGSGRKGGWFFEGPDGEWHFTRGQKPQKFLRNAFRQNKEKVIEILGKEYGATFKGG

SEQ ID NO: 6627 - protein, 118 aa, Enterococcus faecalis
KNEVGIMYSPQTFFLQEVKGQKPDGLGGLIDDWGLFKEVSGYIDLVTGTDETTKQNAFVEESTHILIIPEFIEGITDNMRVVDQTNRYYDITYSDNPVGIKHHNEIYLKFEGVLSGEE

SEQ ID NO: 6628 - protein, 181 aa, Enterococcus faecalis
EVANLIISIEEAKKIDPSVTQSDLDAFEQTVRQLTNNNFQNVHIRFRDVVFKGNSIVLKDNPLGLRVGDTIQISNSKVNDCLTTVEAITEKTLETDVEEPFFDGSFSGAFITKVKYPADIKMGIEELLRFKKSMGAKLGIKSESIARMSITYYDVNASDNIEGFPAAKFSFLNKYKKMRWG

SEQ ID NO: 6629 - protein, 107 aa, Enterococcus faecalis
SSYFKSSKKSVTPTNPATGITPSQKTWTGAVGATKTFTIAANPVDATNAQAVISAITVISSNESVATITKNKNGGFDGSIIAEGKATFEFTSGAFTTSIAVTGTPAS

SEQ ID NO: 6630 - protein, 292 aa, Enterococcus faecalis
LEEFFMATKFYTKQYAGLLAKITEKKSYFLRAFGGELQTSDAVKDSDTFLMLKTSDTPVVMQPYNTGENVAFGTGTGNSNRFGPRKEIKSIDTTVPYESPLAIHEGVDNITVNDDADAVVAERLEEQAIAWAEYIDGLLGKALSDAASETIRFELTSEGVTKLFSTAHKTFVNNLVSKSLAWVAYVHPDVYDFLVDNGLATTTKNSSANIDEQTIYKFKGFVLVEIPESKLQTGEMAQFSADSVGIAGVGISVTRAIDSEDFNGVAIQGAGKYGKHIPEKNKVAILKAVKKA

SEQ ID NO: 6631 - protein, 192 aa, Enterococcus faecalis
KTMEWIKQILAKHMKEDGTLDMEAANKEIDKEFPVNAVPKDQYNNLSSQLAEANKTLKSLEAKTKDNPDVQKELADLKEKADALEKENKDLKINSQVSAALQSAGAKDIDYALFKLGELELDKDGNVKDLESKVKDLKASIPDYFEKKDTLDDKSKKKTENKAGYQPIDNKLPKGKEPNEKDPFEAILSKYE

SEQ ID NO: 6632 - protein, 87 aa, Enterococcus faecalis
HSPIKRLSAIFISKGGHKMEDPYACLDVDYQEFYEWVSSQEPDFEQATIVVQRPNGEVTIYYSQNGSLQLLGMLDIAKQQVLDDMRS

SEQ ID NO: 6633 - protein, 69 aa, Enterococcus faecalis
QFLGKVDVDYRRSALEMTDKEFDELYKLLDTAKTPEERERLRQEYYQQHKLNQPTLLDRWQADADNYNE

SEQ ID NO: 6634 - protein, 489 aa, Enterococcus faecalis
PQMSQLNKWQKELQALQKANYQETDNQLFNVYRQSLIDIKKRLKVYTENAESLSFSTRLEVERLFSVADEINAILQLNSPKVEKTIKGYSAKQAEQGYYGLWYTLEQSQNIALSMPLINHDYIMNLVNAPVAGKRLSKRLYKYRDELAQNVTNNIITGLFEGKSYAEIARWINEETEASYKQALRIARTEAGRTQSVTTQKGYEEAKELGINIKKKWLATIDKHTRRTHQELDGKEVDVDEEFTIRGHSAKGPRMFGVASEDVNCRCTTIEVVDGISPELRKDNESKEMSEFKSYDEWYADRIRQNESKPKPNFTELDFFGQSDLQDDSDKWVAGLKPEQVNAMKDYTSDAFAKMNKILRNEKYNPREKPYLVNIIQNLDDAISKFKLKHDIITYRGVSANEYDAILNGNVFKEFKSTSINKKVAEDFLNFTSANKDGRVVKFLIPKGTQGAYIGTNSSMKKESEFLLNRNLKYTVEIVDNILEVTILG

SEQ ID NO: 6635 - protein, 510 aa, Enterococcus faecalis
MEALLSEDVKIIASALKAAIDKDRKSTSKREAETGIRYYNHENDIMNNRIFYVDDEGVLREDKYASNVRIPHGFFPEIVDQKTQYLLSNPVEYETENEELKEYLAEYYNSEFQVVLQELVEGSSQKGFEYVYARTNAEDRLCFQVADSLNVFGVYNEYNELQRICRHYITEIEKDGETVDIHHAEVWTDQNVYFFVAEDNKDYELDEAEPINPRPHVLAVDSDNESLLQRSYGQIPFYRLSNNKQETTDLKSIKALIDDYDLMNCFLSNNLQDFAEAIYVVSGFQGDDLSKLRQNVKSKKVVGTGSDGGLDVKTVTIPTEGRKTKMEIDKENIYKFGMAFDSTQVGDGNITNIVIKARYTLLNMKANKTEARLRALLEWMNKLVIDDINRRYTKAFDPTEVSFTFTREVMVNETDIVNNEKTEAETRKIILESILQVAPRLDDDNVLRLICEQFDLDWEDVKEALEEAEYTQGLTDNTDEEETAVTPNVPTQQMAEGATGSTESQLPGNG

SEQ ID NO: 6636 - protein, 420 aa, Enterococcus faecalis
FYMSPKKRKYLNLIKTNPVIFGNLVGFTDLAELHNDWLKSFLFEKDDQTLLAHRGSFKTTTLAIAIALLMVLFPNKNIIFLRKTDTDVVEIILQVAKVLSSKYFKTLVFALYGVELVLLKETTTEIDTNLKTSTRGTSQLLGMGIYASLTGKHADIVITDDIVNIKDRVSRAEREKTKLQYQELQNVKNREGRFINTGTPWHKEDAISKMPNVKKFDCYETGLIDKEQRKALQQSMTPSLFAANYELKHIADSESLFTAPTYIDNTNLIYNGVAHIDAAYGGGDSTAFTIFKEQKDGTIIGFGKKWQKHVDDCLPEILQLHQYYQAGTFYTETNGDKGYLAKHLIERSQYVQKYHEKTNKFIKISSYLRKYWSRIIWLEDTDKEYIAEILDYTENAEHDDAPDSAASLLREIKNTNKWLY

SEQ ID NO: 6637 - protein, 179 aa, Enterococcus faecalis
YTVISKITQKRHLPKKMGRCLFLIQKGGEVMAKYTEWLTEEGLIKIEGWARDGLIDKQIAQNIGVAYSTFREWVKKFPALSASLKKGKEVVDRQVENALFKSATGYEYTEVTEELTENGMEITKKVKKQVAPNPTAAIFWLKNRKPDEWRDRKETEVSGVLNISDAAVEIEQFFEDDST

SEQ ID NO: 6638 - protein, 160 aa, Enterococcus faecalis
FCIKMYKLRLIVKAMNKKVGESTLYEWLVSYQKLEQEIYYLDWELETYKKELERWCDPEDLGRYTLTKDSKASKLEDIIEDLEKRLAWKMNSIYDLRKLVYSFKGLDQKILVAKYIEGLSLKQIAGEFGHSYGYIRNKHNQILKKIEKSDNDVTIPIDKS

SEQ ID NO: 6639 - protein, 459 aa, Enterococcus faecalis
LSLKATLHPYQEYSKNFILDHPYCALMLDMGLGKTLSSLTAIDELLHTFEIIENVLVIAPLSVAEKTWTDEIEKWDHLQHLTFSKVLGNPKQREEALFKKADVYLINRENVEWLVNYYQRNWPFKTVIIDELSSFKSSSAKRFKALRKVRPKMERVIGLTGTPSPNSLMDLWAQMYLLDQGERLGKTITQYRNKYFVPAQKNGHIVYSWQLIPGAEEAIYNKISDICVSMKAKDYLRLPPRTENIIELDLNPTSWKQYKELEREYVLELEGTDVVASNAATLSNKLLQLSNGAVYDENGDGREIHQEKLNALERVIEDAQGQSVLVFYQYQHDLERIQARFKQAKALNVSDGDIEKWNEGKISLLLAHPQSAGHGLNLQKGGHIIVWFGLTWSLEFYQQANARLDRQGQTQPVIIHHLVTKGTIDEQVIKALQAKEQGQSALMAAVKAKIEEYRGDKLG

SEQ ID NO: 6640 - protein, 134 aa, Enterococcus faecalis
HGIFKRRLKKIDLMEHINQYLIRWEAEVMQIENDIEKYLVRQIKRIGALCYKFTSPGTRGVPDRIILYQGNVFFVELKRPGGKPRKDQLKIIEKFKEQLIPVFVIDSKQGVDMLIYAMQSGIARVMPDMSHKKE

SEQ ID NO: 6641 - protein, 747 aa, Enterococcus faecalis
HKRLSKTTKKCQSLSQGEVKDVGAFIGGWLKEGRRKRGNTQQRSLVTLDADSTTLDFWDDVQLLFDHAAAVYTTHSHLVKGPRYRLIIPLSRPVTAEEYEPLARKLAEFFGMDNFDDTTYQAERLMYWPSHSIDGEYFTDNIDLPWVDPDEILSQYEDWRDASFWPESSRGHSIRERQAKKAGDPLEKKGIVGAFCRTYDIISAIETFLPDIYGSTGREDRWTFLEGSTSGGLVIYDDKFAYSHHGTDPVGDQLVNAFDLVRIHLFGDLDEDVKPTTRIDRYPSFKAMREFAMEDKQVKTLIQSEKLSQALEDFDGELDELEEDDKDWFTKLDLEIDEYGQIMASAKNLEVIMLNDPNLKKKIFMNSFSNRIEVKDNLPWRKLDRDKMWKDSDDAGLRVYIEKIYGIVNRGKIDDALVQEIERNSYDPVKEYLESLHWDGVPRVETLLIDYLGAEDTPFIRVVTKKFLTAAVGRIFVPGIKFDYMLVTSGPQGIGKTLLPAKLAGDWFSNSLEGVTGKDSYEALQGVWIMEMGELSATKKADIEATKHFISKQEDIFRVAYGRHKSYFKRRCVFWGTTNDNEFLRDKTGNRRFWPVDVGIQPIKNKVWEMTDETRNQIWAEAVELWQAGEPLYLTDEQEKLALEAQEMHTETSSMEGEILEYLEIPITEDWYKRSKQERREYIQGWGTDIQEEGEIVRNKVCIAEVWNELYNGDSKNIHPGKSCRNSSSFKPFIWVGRKTAKVIKDV

SEQ ID NO: 6642 - protein, 73 aa, Enterococcus faecalis
KKGSGKMEQPEKNIKLAYDGEIHLAVGASKTEKKWKNRQMSWSDFTQRLKTPTVTQETVEDYKKMPKSKPGRS

SEQ ID NO: 6643 - protein, 101 aa, Enterococcus faecalis
KMKLKLVDVETNPHEEEVGTCEFCMSVEMVNEPVFVFKKDIGELVRVKAFIWSWGFYDEENIENIVDFAAYVNEQEFDEEQELDYSWLTNLIYEYEYGKDC

SEQ ID NO: 6644 - protein, 83 aa, Enterococcus faecalis
EVQIMALNYVKLELTTGGVFSTGKVFEFSYSDYENFKHRFLKRFGNICSNKKFKDLIKNTNDFEELEFVFFDSDDWELKITKN

SEQ ID NO: 6645 - protein, 654 aa, Enterococcus faecalis
QMKTLNIDIETYSDEDLTKVGVYKYADSPNFEILLFAYSVDGQPVECEDLTISEIPDEIVAALTDKNVLKIAFNAQFERVCLSKYLGIPYYLDPAQWHCTMVHANELGLPASLGQCAKYLNIEQQKDTRGTQLINFFSKPCKPTKKNGMRTRNLPEHAPEKWQTFIEYCIQDVNVEMAIANKLNRFPVPESEWKLYTLDQRINDRGAEIDHELATAAIDIMADLSEAGLNEMKALTGLENPNSLAQLKKWLEEQGTPFEKLGKEVVLKALALGNLPENVAEVLKLRLSLSNSSTKKYLMMDNARCSDNRIHGILQFYGANRTGRWAGRLLQVQNLPRNYLSEIDFARQLVKAKDVEGIELMYEDVPDTLKQLIRTGLVAKEGHRFIVSDFSAIEARVIAWYAKQDWVLEVFRTHGKIYEATAAQMFHLGEVTDYDWKSHEGKDMRQRGKVATLALGYQGGPGALKAMGALENGIEEHELQDIVDRWRTANKRIKNFWHETQKAVIDCLQNGGIKKGPRGLKFYKKAGFLFIQLPSGRKLAYAKAHLKEGDYGPAIFYEGQGDKVAFTEQQTYGGKLVENIVQATARDVLAEAMQRLEREGYPIVFHVHDEAVAEVPEGEKSIEEMNKIMSVVPDWAEGLPLNAEGFETKYYMKD

SEQ ID NO: 6646 - protein, 184 aa, Enterococcus faecalis
EKMKPTKARLRNHVITLKNSVEKEIRAKKTKAIRAHIESEWLKIDPEFEKLHRYFSSLRIRQNVKNELVDLLEENSLEIWSFYRDTDARDFETYKKGFLEKLKYNSIKGLAKVEAVYDQEIQEVRETYNAIIANVERVPAKQGVAYLEELGINVDVFKEEEAQLPMIAVDKSKLRLPSETADSK

SEQ ID NO: 6647 - protein, 84 aa, Enterococcus faecalis
NAPFLLKGEIEMGKRPIYLPIELQDVFELIEERKLDSIYFENGSRLESVRLHRWEFKEFGDTNFYVKQEYTPVEDQGVGKNETN

SEQ ID NO: 6648 - protein, 194 aa, Enterococcus faecalis
EFKMAKVTGTKVITNQVRLSFVHVLEPHAMEEGQEKKYSCMLIIPKDDKETLKAMKEAIKTAYEGAKGDKLKGVKFERLKTTLRDGDEEMDTEERPEFENAMFINVSSKTKPQVVKREDGVLVKTDDPDEVYSGVYAIASINFYAYSTAGNKGVTAGLNNILTLCKGDFLGGRANAESDFGDLEWEDEEDDMFS

SEQ ID NO: 6649 - protein, 114 aa, Enterococcus faecalis
KVGDKMPQKSCKEKPVIFSGKGYYITREDTRNVGLYVFSENKVLFKGYFNTIEAALSSLVTNSLLVDETWTMNLKNYKESILEMKEQIISDIKQYFTEQASNSLDDLEEDELFN

SEQ ID NO: 6650 - protein, 86 aa, Enterococcus faecalis
RGGVMAMKKIDTQEAIASTLKKGMEKAEHSGINVSEDEFTVIQPFDDLNAVIVTVENSTGNRPVNIKVTDTVVILERQEGTLDVFK

SEQ ID NO: 6651 - protein, 392 aa, Enterococcus faecalis
ISMPVGNHALLGASSAHRWLICPPLARLEEKVKDRGSSYAEEGTTAHELAELYLAKRFKLLTARAVNSRLKFFEQDHPYCDESMKEYVTAYCDLVEERVNQYENATVELEQKVDFSKWVPEGFGTSDVVVLSDKTIEIIDLKYGKGVPVDAYLNPQLMLYALGAVDKYDIIYEFETVRMTIIQPRLDNISTFEIEKEELLYWADNYVAPRAVQAWEGTGEWTITDDVVKFSKVRAQLRPRAERNFQLIDKHELKEAPLLTNEEIAEILERAPEIKKWLEHVETYALQKARDEGEEFPGWKVVAGRSNRKISDNEGLLMVLEAEGFEDEDILKPQELKAIGQLEKVVGKKKFAELAADFIIKPEGKPVLVPESDKRPALNSVENALNDFEGVE

SEQ ID NO: 6652 - protein, 160 aa, Enterococcus faecalis
KMANIYLNIEADSAQELKEILSQLATDNVVEVTQSLNTADKKATEEVEKAAKKEPAKKKKATAKKKEEVSTASTSDTEPSKTGEKVAPTDSETEEVSATADLHLGATKADVQEAMRKAMDKGKRPMIKTCFSRYNAEKLSDLKEEHYGKFITDLETLVGE

SEQ ID NO: 6653 - protein, 65 aa, Enterococcus faecalis
QLMLSPYKKIRRKAGMSQEELAKRMLLPVKLIKVYEKRNVDPPLHYHANFKAIFNVTDEDINQLK

SEQ ID NO: 6654 - protein, 84 aa, Enterococcus faecalis
KLMSDKKIVLPDFLTSKQKEQILKAYKWGKPIIVKGQQGPTGKTTLVNCLRKQGIQAFEAWECLTLELNQIGSVATHVIAVQEN

SEQ ID NO: 6655 - protein, 236 aa, Enterococcus faecalis
HEKGETQMRNYYHVKTQEAYDNLMAFLEEQGYVWATGLEPTKTDLWKWHKEKTVIEVNKANRELSIISAPFLEHILGITDFIEWTATSPKKSIEVSKEFDKWVQKSKEAHIDYKSWCIWQINKMGWDHWLEDPITDEELLTGKGLEWTKEVEENRELHTRAILDGYTVKKEPMYEIPLPYAINATGKQQYLSYNTEKNRFVCTAKSDKLKQRFTETELKEEVPGFYRELAVKVDER

SEQ ID NO: 6656 - protein, 64 aa, Enterococcus faecalis
MLTANEAFLVREAVREKIETLRDAVRHESAKHPTMQDLRTLKHFQAELERYEVAYQKMLNEVGC

SEQ ID NO: 6657 - protein, 70 aa, Enterococcus faecalis
KICRCLHWKERMITVKKIYQLRRIAALLVVFGLGLLVGGNIGPLIQNIYIAVFIIWLLIYDLALEDREVK

SEQ ID NO: 6658 - protein, 83 aa, Enterococcus faecalis
RFCDGFREVKAMKKLHKILQKASVEFYETFYGSIDYKLLDAAQFKEFERKINLRYCCTDPEKNISIYEVYDERFADVYIGKKG

SEQ ID NO: 6659 - protein, 80 aa, Enterococcus faecalis
EPHAQINSVGGFTKMIICYKGEDLKVQDTCSTYDNISVVLFKGQKRVYNHRTNEIVGGDERLPEAKAIRNFNGSVMVLGR

SEQ ID NO: 6660 - protein, 95 aa, Enterococcus faecalis
EGVRGMPKPVKVDLEAVEQNPDRASIKYGNKAVVQKMYSITKSSLEKWLALMQDTPQFSSGVIHPTHKIVLIELDVFDEFVRWMDKNRYKKRKGG

SEQ ID NO: 6661 - protein, 118 aa, Enterococcus faecalis
KMNYAHEMPALTAEDIVKSRLHLIVKDLFKEVFKTNNRINRCREKISSSSLCDGTNRYWKAQENLDASIREKSFLLHQLLQLDVSYRWTEKLHQDRYSFVTDYVAVLVELNELKHERG

SEQ ID NO: 6662 - protein, 76 aa, Enterococcus faecalis
MRGDVHMNCTRGSLRAARIKKSLTQKRLAELTGVTETTIRNIENGRSCPSFKLSIMLAKLLNVDFETLWEYDFRNS

SEQ ID NO: 6663 - protein, 124 aa, Enterococcus faecalis
RSFKMTSFALRLKELRKNKKMSQQELATFLGMKRENISNYERGVITNVSSDTLEKISELFDVSIDYLLGKSDTSNQKNESMAKQVMMRMDTDGLSSKQVKELEDEMERFFSWRIEEIKKENLSE

SEQ ID NO: 6664 - protein, 234 aa, Enterococcus faecalis
VNNYKVVFRMTVEVDEYLNFCGTINEFISAHMLCLGMSVNNYEHRYIWDEILTSKSIKIRPFPFEKTARRSISGMIIKDDYETTLAYNSNMGEKRKNFTISHELIHAMYHLDSENKVFTDTKDTLSYSLADILPEFQANIGASSILLPEPVLINELKKGTPPYFISNRYGISEQAIFMRLLQQMQASFEASYVAAYDTANKIMNGNSKNLAIELGRNLERKILYSNPFYEAITL

SEQ ID NO: 6665 - protein, 183 aa, Enterococcus faecalis
IERRMIEMKKMIKFAGIALIFAALLSACSNAKNNTQKKAETAAQSSTIEASDSNENEPNTENITQAVKQLEEKFNSDEKLVKIDVKNNVKDDTSDNPHAVITVKVINDEAKKNMEEMQTAIDSNSGTEAQKTAIYGIQLNVEEVAKTLENDNDVISFITPYTNGNDRTIAKSTKNENIIPLVK

SEQ ID NO: 6666 - protein, 412 aa, Enterococcus faecalis
VPIKGELNMWVEKKKDKKGNITYQYRERYTDPRTGKTQKVTTTLAKNTKQAENAARRELEIKIQKILTDYEEEKRLENLIKNEGVIPNDKTLEDMIKEWFDYIQDPKSKERKKGSTLSGYSYGIDSLLNEFLVIEKDKRIQDLTFDDIQAFYDRMIFDFEYQKSYIKRFRAIIRGAFTLAYKKRYIKNLDAINLSKIVTPAKTVDDLINEQVPRYLEKAEAEQIFQVLNGYNPLYTQILELQFHTGMRFGELIALESKNFHDGFLLDIHGTYDHATRSHTRGQKVPPKTRKSFRTIELGDAAVQIIKDRMYHNHFIKNKNSDFLFVTSNDRPYDLGTINSFIASHQIEFNTSTKVSTHVFRHTHISMLAEKSIPIQVIMDRVGHEDRETTEKIYMHVTKKQKTDLVKTLNEL

SEQ ID NO: 6667 - protein, 466 aa, Enterococcus faecalis
KDDENMTAIEPKLTEKFHQDFLNNNKQNALRRSVVKNGISASGESVQGAVNNVPVFSVDLATGKVANQKQSGRCWMFAALNTFRHRMLNAFQLKDFELSQNYTFFWDKYEKSNYFYENIIATADQPLTSRKVAFLLATPQQDGGQWDMIVSIFDKYGVVPKTAMPESSNSSNSRDLNNYLNKKLRKDATILRSLIEKGASAEEVQKNKEAMLQEIYNFLAISLGTPPETFDFEYRDEEKNYHLDQNLTPQTFFEKYVGVNLHDYVSIINAPTEDKPFNKTYTVEMLGNVVGGKEVKYLNVEMAAFKKLAAAQLEQGESVWFGCDVGQSSTRDTGIMALDVYDMNDLFDIDFTMTKAERLDFGESLMTHAMVLTGVDIVDGQTTKWKVENSWGEKVGENGFFVMSDAWMDEYTYQIVVHKDLLTDEQKKAWEQAPTVLAPWDPMGALATQGLDSFFLGKGHKKGKNN

SEQ ID NO: 6668 - protein, 152 aa, Enterococcus faecalis
SLPLRKSFTNVSWQRCQVHFLRNIFTTIPKKNSKSFREAVKGIFKFTDINLAREAKNRLIHDYIDQPKYSKACASLDDGFEDAFQYTVQGNSHNRLKSTNLIERLNQEVRRREKIIRIFPNQTSANRLIGAVLMDLHDEWIYSSRKYINFDK

SEQ ID NO: 6669 - protein, 74 aa, Enterococcus faecalis
TYMMLFVLLNLLLKLILKQLLLSKAHRNFTSPQVYGEPYGSIIIPTSHHHFLLTIKIILEYLSLLLYDKRSWRN

SEQ ID NO: 6670 - protein, 1306 aa, Enterococcus faecalis
FLKQQMKAKKQYKTYKAKNHWVTVPILFLSVLGAVGLATDNVQAAELDTQPETTTVQPNNPDLQSEKETPKTAVSEEATVQKDTTSQPTKVEEVAPENKGTEQSSATPNDTTNAQQPTVGAEKSAQEQPVVSPETTNEPLGQPTEVAPAENEVNKSTSIPKEFETPDVDKAVDEVKKDPNITVVEKPAEDLGNVSSKDLAAKEKEVDQLQKEQAKKIAQQAAELKAKNEKIAKENAEIAAKNKAEKERYEKEVAEYNKHKNENSYVNEAISKNLVFDQSVVTKDTKISSIKGGKFIKATDFNKVNAGDSKDIFTKLRKDMGGKVTGNFQNSFVKEANLGSNGGYAVLLEKNKPVTVTYTGLNASYLGRKITKAEFVYELQSSPSQSGTLNAVFSNDPIITAFIGTNRVNGKDVKTRLTIKFFDASGKEVLPDKDSPFAYALSSLNSSLTNKGGHAEFVSDFGANNAFKYINGSYVKKQADGKFYSPEDIDYGTGPSGLKNSDWDAVGHKNAYFGSGVGLANGRISFSFGMTTKGKSNVPVSSAQWFAFSTNLNAQSVKPIFNYGNPKEPEKATIEFNRYKANVVPVLVPNKEVTDGQKNVNDLNVKRGDSLQYIVTGDTTELAKVDPKTVTKQGIRDTFDAEKVTIDLSKVKVYQADASLNEKDSKAVAAAINSGRAKDVTASYDLHLDQNTVTAMMKTNADGSIVLAMGYKYLLVLPFVVKNVEGDFENTAVQLTNDGETVTNTVINHVPGSNPSKDVKADKNGTVGSVSLHDKDIPLQTKIYYEVKSSERPANYGGITKEWGMNDVLDTTHDRFTGKWHAITNYDLKVGDKTLKAGTDISAYILLENKDNKDLTFTMNQALLAALNEGSNKVGKQAWSVYLEVERIKTGDVENTQTENYNKELMRSNTVVTHTPDDPKPTKAVHNKKGEDINHGKVARGDVLSYEMTWDLKGYDKDFAFDTVDLATGVSFFDDYDETKVTPIKDLLRVKDSKGVDITNQFTISWDDAKGTVTISAKDPQAFILAHGGQELRVTLPTKVKADVSGDIYNSAEQNTFGQRIKTNTVVNHIPKVNPKKDVVIKVGDKQSQNGATIKLGEKFFYEFTSSDIPAEYAGVVEEWSISDKLDVKHDKFSGQWSVFANSNFVLADGTKVNKGDDISKLFTMTFEQGVVKITASQAFLDAMNLKENKNVAHSWKAFIGVERIAAGDVYNTIEESFNNETIKTNTVVTHTPEKPQTPPEKTVIVPPTPKTPQAPVEPLVVEKASVEPELPQTGEKQNVLLTVAGSLAAMLGLAGLGFKRRKETK

SEQ ID NO: 6671 - protein, 137 aa, Enterococcus faecalis
RRKEGRTDCPSFFSYGGETLEAVVVEREAKGMKEIAIQEKDLTLQWRGNTGKLVKVRLKNTRAMEMWYNKQITEENIQEITTLNIIKNGKSLALEVYPEKSIYVKPNLGRINVPVFFIKTPINRGVFEEIFGETLKA

SEQ ID NO: 6672 - protein, 61 aa, Enterococcus faecalis
FFVFLCLTKHPQIPTNLAYLIDCRQKIQANNLEQKIHTLAFLSPLLMLLTFRRKSLQILLC

SEQ ID NO: 6673 - protein, 135 aa, Enterococcus faecalis
VKEKEKPMYVSFVLSCLLGFSAYSLLNRLNSLEFVDVWLDKETQKITLKRCFYDTSFKKQTLKELERVYFQLKEIINVQINKRSLNTNDIRNVRELEEKQQEIKRFMLDVLEDAYWKELANMPEDQRHLDDWDFF

SEQ ID NO: 6674 - protein, 96 aa, Enterococcus faecalis; identical to SEQ ID NO: 6585

SEQ ID NO: 6675 - protein, 299 aa, Enterococcus faecalis
NLCKGEFMYISFDLEATQAEKIALPVHQRFSLVQGLLLLEQANQEVLATKQGGTIAYFLYTGKEQELPILEAELLLPVKQKDMLDVLLEPVTNDPTLDPIEVKNFLQLVNQSLPKKQRAKSNKKGTEKKETTDTKPVKKKFFLSVSLITLVGLILLMSGFLLGKTNSTPYQEKELEVKKELNTLTEQVNDQNKVETFTRFFLTNYYSGKTDAKTRQAVLKKFVKKEILSDFLSEKSRARSMFPWEVKKKDKQWTIVFIVVLINEKAEQSTKKITFTAEETKEQLVVMERPTEEDFELTN

SEQ ID NO: 6676 - protein, 291 aa, Enterococcus faecalis
WNDRQKKILNLQIKIKMEEIMMKKILFASLFSATLLFGGSEISAFAQEIIPDDTTTPPIEVPTEPSTPEKPTDPTPPIEPPVDPVEPPITPTEPTEPTEPTTPTEPTTLTEPSEPEQPTEPSKPVEPEKPVTPSKPAEPEKTVTPIKPTEFEKPVQPAEPSKPIDVVVTPTGELNHAGNGTQQPTVPIETSNLAEITHVPSVTTPITTTDGENIVAVEKGVPLTQTAEGLKPIQSSYKVLPSGNVEVKGKDGKMKVLPYTGEEMNIFLSAVGGILSVVSGFVIFKKRKAKV

SEQ ID NO: 6677 - protein, 79 aa, Enterococcus faecalis
ARKKREAQRQFFSYSWYAPIYTLAYTLALRFLKMTNPDTTDKIPPTADKKIFISSPVYGKTFILPSLPFTSTFPLGNTL

SEQ ID NO: 6678 - protein, 426 aa, Enterococcus faecalis
ERTMNKKRIVFGLLSFFLPIFLVFGGLLFFLLLLTSTSDTSKNDCIQPSINNPTDATDTPKSIEQFVKSHKDAYLLSLKAGGFLPSASISQTMVENGFNFTNPSGTSFWQAHNMGGVKTSKKEDFPVTLATFGQDSVDISGTKPGSNVGDGTGGAYTWFKDYNAGIVGKAEFMAHQTLYTGAINNTDGLSTLSAIYSGGWATDPTYLMKLQATYNSLGKQFQWLDQEAIQKYGNAPFKKSELVLNIPGKSPITNEKYGKNSDCVVTSDTSDQVTGQNTAPSLEVPSAYKGKLTLPPIDSNDYAGNNYPFGQCTWYAYNRMAQIGKPIEWFSGDGGNGAGWANSARAKGYTVVKVKPSVGWAASMQGGIGGSAPPYGHVAVVEYVNSDGSILVSEANVINQGSGTRSWRVLDRATVEQIDFIQGKGA

SEQ ID NO: 6679 - protein, 214 aa, Enterococcus faecalis
FYSRKGSVAMRERLKQAQPLVIVLLLVLLTTLGGGYFNEKKENAQIKNQKEKEQQVLKKTLEEKNGQLNDLSRKIEQLLDEKEDPVNEPLTKAVNALFSLLFDYDSSNKEQTVAKRKEKATVYATEQGLSGVFPRDADKVVPSVVTVSQLDKAPEIYRTTQKDTGKEKTALVRLEYSVRIAGSQTQRGNFIYKVTFNEESKKFTTIENLGEENQ

SEQ ID NO: 6680 - protein, 138 aa, Enterococcus faecalis
VRKISKKVRITTLISLMLVLGGISLFLFMVKQNEKAMLNQEKERAAVVLADNETRVLFFYKDTCADCQKVYPTVYEEDQGENNIVFINLNQPKNRHYIKTYTLEKVPTFVTPKRRYVGTDTRKIQQLIAENNDERSED

SEQ ID NO: 6681 - protein, 106 aa, Enterococcus faecalis; identical to SEQ ID NO: 6577

SEQ ID NO: 6682 - protein, 327 aa, Enterococcus faecalis
KEKVRKETRVYSLVQIIRAIFRSKEKEPENSRTICFSPRSAKSIYSMVFFLLFFLISLFLLMSFGRLNTLTRLAMQKQVNREEIIESVNKGVAASDQLKYDGMKLVDRLFTVSSKLEGKEYWEAQITPYLAAGLRAEDLGLDKTNDDRVARNVRFIRLETVDYKESLYSLYYDVRFTEGKEWRQVQVILPVSYAENELKLLDRPTLMNLAKTSESNKVVYDEQRFIPKGKEVNEEETKKLTEFTNRFFELYVKNDEKLGLIANVKGLEHATLEKVDITSLRETGQGVYDVRGTYQFSYEGKSPLTSNFSLQIEATKDSYFIKKMNGV

SEQ ID NO: 6683 - protein, 91 aa, Enterococcus faecalis; identical to SEQ ID NO: 6575

SEQ ID NO: 6684 - protein, 156 aa, Enterococcus faecalis; identical to SEQ ID NO: 6574

SEQ ID NO: 6685 - protein, 165 aa, Enterococcus faecalis
EEIILINNVTLVGRLTKDPDLRYTQSGTAVGQFTLAINRNFTNANNEREADFINCVIWRKAAESLANYARKGTLIGLTGRIQTRNYDNQQGQRVYVTEVVVENFQLLESKEINEQRRGQSTGQATFDKSATSNEQPATENQTPDPLDPFSPENSPLDISDNDLPF

SEQ ID NO: 6686 - protein, 189 aa, Enterococcus faecalis
MQRKTSESITCLFRSLNNQIIRKGGERLKYQFLISYFELEVFVAASVKNFQMMEEELLENRIKDYQKNAQKQTTLFYWEMDGEGKEDRDIYHKKRPTPDNAYLLYSEELESEKLVEAEKEAIKIAEKVGTNGFQFMQKNKEIAVFIKLKGNWFWLPLTDLSKVPDFQSPLLSFSKINEGEQFFSSLLKT

SEQ ID NO: 6687 - protein, 99 aa, Enterococcus faecalis
INKKGRVDRALVLFFGQMIRAMTVNKINKKREVYVMYKFILYTLLIILIVFQHIKYEEWFFKNNGRAVMVKDHSTKWALLVTSVIVFEVFLFGSIIFLY

SEQ ID NO: 6688 - protein, 843 aa, Enterococcus faecalis
MKKIGIKKKGVDKVPLKSKEPRLDFPIEAITDNFLFTTSNDVWVGYKLAHQVFPLNNLDFFKEYIEDGKGVFEQDTFDYHFMNIPEYFDLDEQIEATIDNLVKGSFADLGETYFRQAGDILKDEVQMNKYSTYLFIRFTAPIQVANPMEYIELFKEVGRKAINALTGVHVPVSQLYRAYQGLENKIYKDLSNFKNVERMDPRTIGRLFYYFFHRANTRLPERTLLPEEMTEGIIENNTGYMTIEQLDKTHYLAFLPLISLPTSMFGSAIIQNLQDSLSTTIETHVKVTFRHPDKDKRDVHKRRKRIYEQDKEQTQVDGILDEDEVILFGEERLHELSKKIRSKERRLCRMTTTFVLSADSKQALEEKIKELEFVLDGTDYKLYRPLVDQLTLFNQCLIGAKSQFKSYEHVVSTGYVADLGMDLEKEIGNRYGMPLGRVITAKKFKSVQQALSLSSKIVWFFPNLTKKAIEGAQYTNGNTLIIGPPGQGKSVLVKYIFLWLTFLGQKILYIDPKNETVLFFKRALDKFGHIPEFKALYQRINFVSLSSEERYRGMLDPLLFLPREEAIQTARNVLENFGEVTTDSHTASDKKTLILDSVNAVMKGKGKKHLTKVIEVIREKDPKLANLISGHNVGLGKILLGNDYSEPIRFENQINVLGTQGLKIPTQAEIDSGRLNNEQIAGMSIMEVIMKMTTIFSTDKTEDAAIIFDEAKGFEDTAQGRFLIEGSLRQGRANMTDIYLVTQAFMDYDKEDKKELLSYKFAFRPNQKEAQKKVLEFFGMDTNPANIQLINELKSGTCLFQDHRGRSQPIAIDVLFDSWLMAVSSTNKEDEATQMALAMEQGS

SEQ ID NO: 6689 - protein, 141 aa, Enterococcus faecalis
WPFRLLIKRMKLLKWRWQWNKDHKKGEVSMKKVLPFIALVGLLLLSGCGTDMKKILTADGGKWKVEETRATYTFFDDGKFSANDSEDSVSGTYTYDEKNKKITFDITSRNSFIMEKVEYKDNKITGEIGEKQRTLIKQKTE

SEQ ID NO: 6690 - protein, 785 aa, Enterococcus faecalis
RGDTLDKKSLIKAALLLLVGCFFVFTQTTSVNAAPKPDENKVIVTEPTTNVDTIYDTYKDNAFELMTKEKEKDSAFGVKEAITNASAAVKTFVWAGVKGLGEFNAVMVKTLFSMDIITAIKQPIMNLTSSIATNMLGIAGTIGIAFVFVILGVKFIGQQRYKRFFGIFLMTILIFTGLSVLKDANTSNSLFDMMFSVDKEVETAFVNINPVLGDVSVPMTEKGKDKNGNEVEQKLSADQRAKSAGNLIASRVFYTNVYEPYLLMNYGTSDVNKIRKKTVKYKDKEYDRINLLLDNDMNSEENNKLMEEVVNYESKDLKNRSIMYYNNWTNTFYGLFYLVVNFIQTVVYFLLSFLRLIIAVIQLFLLPLLPLLLFAGLFLTETNVFANYFKTFGMTIFMKGMVGFATIFFASFLSLGFQLSNQTENVWQKILTILIYLLTPLGLYVFRKFFANLVTGRVSLSDGVGFIGNPFGTEANMRRAAKEQKQENKERRKQAQEERKAAIKKRQEEARKHGKAETGLKQRPLNKEQEKRSALRRELKPRPQHKAPNAIEKAQEGLRQAHEKGRMQEQKSEEQLKRQQHESARQKEYEKDRLKKQKSLKKINDQSDESTNLTALRNQNRRTGQRSKKRETGHQTLMKRQGEKVLQPTNKPKDMKKQVVARSPRRTGQPTTRQNIQPKVAAQTVKRSGGTLGSNPAYRRPEVRKKMDQVKQVTQVDVPQTHSTPQRVQSKVNEPITRMNRHNTPIIKKEKKTKQPPVVRRERKKPGTQKITNKPKGVRQPRARK

SEQ ID NO: 6691 - protein, 755 aa, Enterococcus faecalis
DNLVQGNNLFNNGLLQPKKPPIGQEQQKMTRYHQLRLVFGLVGVLLYPFAILGSIPLLIGLAVDKKDKAANVFDMDYESFLKRNSIVFLSFSAVLFVINVFAFILWIPRGYLSAYLLFPLNLLHTALRFNWETIVALLIGSSGMGAIFLAFSSFVAKRKVISKEDERKKITESKAYKDREKNKFEESQRFTDEQEEAYEEAVETVDIDKYKELSNQLLLGTSEFGLPYIINFSEFNQHVLVPATTGSGKTTLLQLLVQHAVKFNFPVILIDGKGARDTLESMREIAKFYDKEVHAFTDDGDMRYNPVEHGNDISIRDKLVSLAETESVFYSGAAKALLQVTIQLLDEFKGAKVTLSGDTRTTETVERSLPFVQRFLLPRNVLHLFADAILPNNPKLFEIEVEKKIQKPKKKSVKEGSEILPDSDLDKEEKEEDSQIKNSKFRNISQLGIAQKETETIVLNPETLDLDSYYLLLKRNLRYLPTDKETGENIKQKLFERLFIRYEHKDSPFYLYATSEALQTNINMLLDSELGKLFDTKNAKNVLDVQEIVNQRKLVYVSFNGLIYKEYIRTLAQMLVGDVNYFASEMYRKNVKREVLVIFDEPASYLNETFIDMVNKGRGAGVYGIFTPQTMADIAKLGDKLMEQLVGNVNTLFIGKTNEKGEAEYWSETMGTYQDIDVTSVTEQEDGYSDVGKSDWSGDRGTKRNVDRFKISPNKIKELRTGEFIIYRTAENVNLPPQKVYVRNALEWLQKSNSK

SEQ ID NO: 6692 - protein, 266 aa, Enterococcus faecalis
KCGDTLKPLLYNYFIDYSKEDKIHLILLCLLHELRVVSVKQLIDFCQFDNMAKKSSVYGNLKKLKEKNLVECSQIGLTKFYYLTKEGHNYIGGYYTLPKVPEYNLQHHLQINDYLIKMLELCNNHPHLKAVVSERRKVYEVKDEKKNQKGVKYFVPDFIFMFLDSIGREVEWQFEIELTLKTKRRYSQGVFPKYIKHLKNYEDARLIYVTPSSIIKEELDMFKEYFIDKEGDEYKEVFDRLHVFSAEEFESELKRLLEKDKFINWE

SEQ ID NO: 6693 - protein, 167 aa, Enterococcus faecalis
LGVSFMRRIEKEFNKKLASYERELKKLGCLDDETGLIPISKRRWHVIWWQPVTLAKTIVRSFRLTLDNENLCILGDVEITIYHDGTYGISKEAVPIFINDLLSLKKLITIFYGTPFNLNFEKIRCVNFNRYCVSIPEIYVEKFEVLINYLIILSSCLHEVKKHVEYD

SEQ ID NO: 6694 - protein, 93 aa, Enterococcus faecalis
KKESKMLTTKEKNRLKKMVEGNKTFHYSYVDRLRQDVRYYVNQCESAVKARESMEILEFIYSLFSDKEIPAWYTKADLENDKKSIEKLERWAA

SEQ ID NO: 6695 - protein, 185 aa, Enterococcus faecalis
KIGTLGSLAVQQQSERAISMKFIKDVTTLEELKRVYKKLALKYHPDMGGTDKEMAQINNEYEALFDKLKNTHKNKEGEYYQKETTETPQEWQEIIHKLLTLKMENVSIEVIGAFLWVSGNTKPYKEELKALNMKWSNNKKSWYLAPDGYKKRSKKKYNMSDIRNMYGSQVVKEEQAKQKTLTATA

SEQ ID NO: 6696 - protein, 86 aa, Enterococcus faecalis
GGSTMEQQHPTIHTLKIETEFFKAVKERRKTFEIRKNDRNFQVGDILILEEYMNGMYLDDECEAEVIYITDYAQREGYVVLGIELH

SEQ ID NO: 6697 - protein, 162 aa, Enterococcus faecalis
KIRLYVQRGFTSLDDQIKRKKESRMIKTSAVGRLTKSSELRVTSTGKAVANFALACKRERLDKEGNAQTTFIQCVIWGKPAEVLAKYTQKGSLIAVNGELQSRSYDDQQGQTHYVTELVVAGFEFLESKETVQNREQKQQMPEMANAEPFYGMDDMEPPAYH

SEQ ID NO: 6698 - protein, 198 aa, Enterococcus faecalis
RREKMKKLIGKKWLLLTAVATFLLSGCASLEQKAQDSVKEVTENVTQTISNDQRIPADFVRHVDGDTTVLKIDGKEQKVRFLLIDTPETVKPKTKVQPFGLEASKRTKELLSTASEITFEYDKGDKTDRYGRALGYIFVDGTLLQKTLVSEGLARVAYVKEPTTKYLAELEQAQEQAKNESLGIWSIPGYVTQRGFSK

SEQ ID NO: 6699 - protein, 119 aa, Enterococcus faecalis
IIESFWREIITQYVVDNNILCYNYIHKGGVKVATTKKKPIHVNVDENLKEEAEQLFDDLGLNMTSAITIFLKQSINEQAIPFMINKGNKETLQALKDIKEGNVHGGFSSVEDLMEDLNA

SEQ ID NO: 6700 - protein, 91 aa, Enterococcus faecalis
MLEIFYTNQFKKDFKKAKKQGKNLEKLKEVLVLLQEQQTLPPKYKDHALTGNYIGTRECHIEPDWLLIYKIDGDKLILTLARIGSHSELFR

SEQ ID NO: 6701 - protein, 388 aa, Enterococcus faecalis
GGEKMKVSDVISVILKSGIREYKYLNSKIKPIGYKAEGKKGAIFGFRSKELMTESRGIVLTSQEALAENEDKFTHWTPNVYSYGAYADDNRTIVKGHNERNLQQINTFVIDFDRSLGEILDSQMILDAAIDLELMPTLILETPGGFQAYFILENAWYISSKNNYQSIEVAKRVSENLRKAFAEVLPSVDLGCNHFGIARIPRTDNVVYYYPALTHDMQQLIQWSMKFEPKRTHKKPNLNVVAVKMNQIKEQWVKVLIDNPQVVGTKGKLGRNNVIFTLSLAYYASKIEQDRCFDDMDVFNSSLNYPLSVSEIKRIVKSAYSGKYKGASKTYVQELVSNWGLESLSEEKMFTQQRNTWYKFKKERHKRKKSHLSEWKKDILDYLENPVL

SEQ ID NO: 6702 - protein, 125 aa, Enterococcus faecalis
ITLRTQCYRYRPEVSMKKTDLQAAVTFNGQSIPKTSLDRALQELVAEGKLFVQTKAGRGGGLVLATRKALIRTVIQVKQQVKYAYKQGINTFFKEADMLLTLFEQTDKNSRRAREYKQLKLWNTG

SEQ ID NO: 6703 - protein, 441 aa, Enterococcus faecalis
QRRVIKMKKYKKFCFLGVWLLPLVLASCGTNTATNDSQDITEKKVEQVATLAAGTPVQSLDPATAVDQTSMTLLSNVMEGLYRLDEKNQPQPAIAAGQPKVTNNGKTYTIVIRDGAKWADGTQITASDFVAACQRVVDPKTASPNVELFSAIKNAKEIASGKQAKDTLAVKSIGEKTLEIELVEPTPYFTDLLSLTAYYPVQQKAIKEYGKDYGTSQKSIVTNGAFNLTNLEGVGTSDKWTISKNKEYWDQKDVSMDKINFQVVKEINTGINLYNDGQLDDAPLAGEYAKQYKKDKEYSTTLMANTMFLEMNQTGENKLLQNKNARKAISYAIDRESLVEKLLDNGSVASVGVVPKEMAFNPVNKKDFANEKLVEFNKKKAEEYWDKAKKEIDLSKNTSLDLLVSDGEFEQKAGEFLQGQLQDSLEGFCCKVLNLLSNKVE

SEQ ID NO: 6704 - protein, 234 aa, Enterococcus faecalis
KKIAGGMTMNPFKGKQFQQDVIIVAVGYYLRYNLSYREVQEILYDRGINVSHTTIYRWVQEYGKLLYQIWKKKNKKSFYSWKMDETYIKIKGKWHYLYRAIDADGLTLDIWLRKKRDTQAAYAFLKRLVKQFDEPKVVVTDKAPSITSAFKKLKEYGFYQGTEHRTIKYLNNLIEQDHRPVKRRNKFYRSLRTASTTIKGMEAIRGLYKKTRKEGTLFGFSVCTEIKVLLGIPA

SEQ ID NO: 6705 - protein, 81 aa, Enterococcus faecalis; identical to SEQ ID NO: 6405

SEQ ID NO: 6706 - protein, 73 aa, Enterococcus faecalis
IIRYTTDSFQGAKEVPSAYGEFVSIRNRFKNFAVILYNKDKFEWYHKRPFMVPFHFPAFSKCFWFCCKVLNKE

SEQ ID NO: 6707 - protein, 67 aa, Enterococcus faecalis
VPLLMSKYCLFLIVIYYLTGGNNSMSRFCKFGKLHVTKGNVDKLLGILLTASKELKRSLAPTGNLYR

SEQ ID NO: 6708 - protein, 260 aa, Enterococcus faecalis
LLYLFIDVITSGVIYMNKNIKYSQNFLTSEKVLNQIIKQLNLKETDTVYEIGTGKGHLTTKLAKISKQVTSIELDSHLFNLSSEKLKLNIRVTLIHQDILQFQFPNKQRYKIVGNIPYHLSTQIIKKVVFESHASDIYLIVEEGFYKRTLDIHRTLGLLLHTQVSIQQLLKLPAECFHPKPKVNSVLIKLTRHTTDVPDKYWKLYTYFVSKWVNREYRQLFTKNQFHQAMKHAKVNNLSTVTYEQVLSIFNSYLLFNGRK

SEQ ID NO: 6709 - protein, 264 aa, Enterococcus faecalis
MAKMRISPELKKLIEKYRCVKDTEGMSPAKVYKLVGENENLYLKMTDSRYKGTTYDVEREKDMMLWLEGKLPVPKVLHFERHDGWSNLLMSEADGVLCSEEYEDEQSPEKIIELYAECIRLFHSIDISDCPYTNSLDSRLAELDYLLNNDLADVDCENWEEDTPFKDPRELYDFLKTEKPEEELVFSHGDLGDSNIFVKDGKVSGFIDLGRSGRADKWYDIAFCVRSIREDIGEEQYVELFFDLLGIKPDWEKIKYYILLDELF

SEQ ID NO: 6710 - protein, 86 aa, Enterococcus faecalis
YIFYIEDIAVCKDFRGQGIGSALINISIEWAKHKNLHGLMLETQDNNLIACKFYHNCGFKIGSVDTMLYANFENNFEKAVFWYLRF

SEQ ID NO: 6711 - protein, 91 aa, Enterococcus faecalis
YRREAGTVITEMKAGHLKDIDKPSEPFEVIGKIIPRYENENWTFTELLYEAPYLKSYQDEEDEEDEEADCLEYIDNTDKIIYLLYRRYRRM

SEQ ID NO: 6712 - protein, 302 aa, Enterococcus faecalis
MRSEKEMMDLVLSLAEQDERIRIVTLEGSRANINIPKDEFQDYDITYFVSDIEPFISNDDWLNQFGNIIMMQKPEDMELFPPEEKGFSYLMLFDDYNKIDLTLLPLEELDNYLKGDKLIKVLIDKDCRIKRDIVPTDIDYHVRKPSAREYDDCCNEFWNVTPYVIKGLCRKEILFAIDHFNQIVRHELLRMISWKVGIETGFKLSVGKNYKFIERYISEDLWEKLLSTYRMDSYENIWEALFLCHQLFRAVSGEVAERLHYAYPEYDRNITKYTRDMYKKYTGKTGCLDSTYAADIEERREQ

SEQ ID NO: 6713 - protein, 249 aa, Enterococcus faecalis
TRRVQMKENKYDDNIFFQKYSQMSRSQKGLAGAGEWETLKKMLPDFKGKRVLDLGCGYGWHCIYAMENGASSVVGVDISHKMLEVAKGKTHFPQIEYECCAIEDVDFPEESFDVILSSLAFHYVADYENLIKKIYRMLKAGGNLVFTVEHPVFTAHGTQDWYYNEKGEILHFPVDNYYYEGKRTAMFLEEKVTKYHRTLTTYLNTLLSNSFIINQIVEPQPPENMMDIPGMADEMRRPMMLIVSAKKKM

SEQ ID NO: 6714 - protein, 296 aa, Enterococcus faecalis
RIKEDVYMVGNVIQIVTEKLSSLPFIEGIVLGGSRARGTHTENSDIDIGIYYNSDSFDLTAINQIATELDDKNRNNLVVPPGAWGDWINGGGWLFINGYHVDLILRDIKRVEQIIKDTEQGIVTANYQTGHPHGYISAMYRGELAISKILYAKNESLCELKKQAEIYPTALKKSLMNFFIFEAEFSLMFVKANAGVEDKYYIAGHVFRIISCLNQVLFACNNAYCINEKKAIKLLETFEYKPEKYAERVNHIFEVLGLSLFECYDMTEKLYKEVNEIVSEINNFLNEESSDERKQI

SEQ ID NO: 6715 - protein, 79 aa, Enterococcus faecalis
TWRCCMTTAEMIKELCEQMNISVSELARRIGQTPQNFNKKLQRETVTLDELKAIADVLGVKFVQAFILPDGEEIKISNE

SEQ ID NO: 6716 - protein, 525 aa, Enterococcus faecalis
KARNKVTEKNIMVIPARKRVGSTAAKEKIKKLRVAAYCRVSTETEEQNSSYEVQVSHYTEFIKKNNEWEFAGIFADDGISGTNTKKRDEFNRMIAECMDGNIDMVITKSISRFARNTLDCLQYIRQLKDKNISVYFEKENINTTDAKGEVLLTIMASLAQQESQSLSQNVKLGLQYRYQQGKVQVNHKRFMGYTKDEDGNLTIVPEEAEIIKRIYREYLEGQSLVGIGRALEKDGILTAAGKPRWRPESVKKILQNEKYIGDALLQKTVTVDFLTKKRVKNEGHVPQYYVENSHEAIIPKELFLQAQEEIHRRSNIYTGEGKNKRIYSSKYALSAITFCGDCGDIYRRVYWNIHGRKEFVWRCVTRIEQGPEVCKNRTVKEDELYGAVMTAINKLLAGGNNMIKTLEENIHAVIGETTEYQISEINNSLEEKQKELIKLANKGQDYDHLADEIDELRDKRQILLVEDASLSGENERINELIEFIRKNKFRTLEYDDKLVRKIIQSVTVYEGHFVIAFKSGIEMEI

SEQ ID NO: 6717 - protein, 138 aa, Enterococcus faecalis
MAYIPYGYKIQDGVVTVDEKAAGQVKVFFEKYISGLSLTVAGEQAGIEKTHSVMGRILKNVNYLGNDTYPAIIDKEIFDKAEEVRDKRAKDLGRVVELAAFTSPPPKERFKMKKADNKMPVDPFERAEYLYSLIESEE

SEQ ID NO: 6718 - protein, 109 aa, Enterococcus faecalis
LLEERNTLIALMSKGFLEPALFNQERNVLDSEIKNLTTEKTNLVTNSASGVLRANEIKDLINYVSADNFNGDYTEELFEEFVVNIIVNSRDELTFNLKCGLSLKEKVVR

SEQ ID NO: 6719 - protein, 65 aa, Enterococcus faecalis
DSIEDKESCSMLFLRDGEIKATLTTMMNKLAFSHKLILEPLFKSVSQIDEESDRERMDAIDKLME

SEQ ID NO: 6720 - protein, 231 aa, Enterococcus faecalis
LMSTVILAEKPSQALAYASALKQSTKKDGYFEIKDPLFTDETFITFGFGHLVELAEPGHYNEKWQNWKLESLPIFPDRYDFEVAKDKGKQFKIVAELLKKANTIIVATDSDREGENIAWSIIHKANAFSKDKTYKRLWINSLEKDVIRSGFQNLQPGMNYYPFYQEAQTRQIADWLIGMNASPLYTLNLQQKGVQGTFSLGRVQTPTLYLIYQRQEAIENFKKEPFFLNNS

SEQ ID NO: 6721 - protein, 215 aa, Enterococcus faecalis
LIGYCNRENFRGWLKMAKIGYARVSSKEQNLDRQLKALEGVSKVFSDKLSGQSVERPQLQAMLNYIREGDIVVVTELDRLGRNNKELTELMNQIQIKGATLEVLNLPSMNGIEDENLRRLINNLVIELYKYQAESERKRIKERQAQGIEIAKKKGKFKGRQPKFKENDPRLQHAFDLFLNGCSDKEVEEQTGINRRTFRRYRSRYNVTVDQRKKQ

SEQ ID NO: 6722 - protein, 64 aa, Enterococcus faecalis
VGHNRRSKMKKFIYRVLENDEVVAIFNEQQYAQDFIAYEKTISDKQFEIEKVDIADWLLQPREF

SEQ ID NO: 6723 - protein, 207 aa, Enterococcus faecalis
NLCIYNLIPVFQRRLGMTFDYNLKKEEYFQSIRLYTRNYDREGKRKIIVNYLSGTFLLLVSLCMILSLYIQLNNFKKTLPDYMVRILINQLFTKHFAYLAMIVLCFVLGIVIIYNGYIYPSRRKIENSIDLNIFEPRQVEINDKGIFSWSLNNETEKNSYFWKDIEDVFETNEFYLMKISKKKIFVLPKRMLSTKIQSDFIEKHVTK

SEQ ID NO: 6724 - protein, 184 aa, Enterococcus faecalis
RREIMNSIIGEMDLTKYFILLIFPFFLLYIFKFFLNQSFVRKSNIPKRELKEQKINLIELQKKSFAYYSFLINIYFVLHLVMVIFLGMFLGSFYEYGYFTNQSNAISYAFLTLVTALIILLINLLVAVLRIKFLHTDQGKLYVDTHKNVFLLNRKQKIAWFSIHILSVILVGFNILLFLNSTVY

SEQ ID NO: 6725 - protein, 727 aa, Enterococcus faecalis
QMDEMVLGTQKWLNKTYGNVSGFNKVPENGKTGWPTIYGLRRALQKEMGIQELSDNFGPTTERYFKEKVEKQLNERFGAGIGNIVKIMQGGFWCKGINPYVSGTEAVDGLMTGLTTLAIKKFQEMAGLAPSGYMNAMLMKALLDMSAFALVPGGDKNIRSMQQSLNAKYNRYFGLLPCDGVYQRDTNSALIYALQAEMGMDENTANGFYGPGTTAKTPTLTVGSTGNFVKILQWALYVNGFNQSAVFSGSFTSYIAAEVENFRLFMNLPPYNTSADMTVIKGLLSSAGNTDRAASACDMATQLTKQQAQLIKDNGYSIVGRYLTGSVGVGANKKDKNLTLEEIQSITSVGLSIFPIYQDGGWEESYFNEGNGLRDGSLAHNAAFKLGFPYGATIYFAVDVDILDGNIPGTVLPYIKKVKESLDANGMYKTGIYGTRNVCQQAIDAGFVEHCFVSDMSTGFSGNLGFPMPKEWAFDQFYEHSELGFPIDKVAVSGRDHGTKAFSTTIGNLIQLETIKLLNALGKNFTIKDVGIKLDTPTQIISSPTLDVYFKSSASWTHKVDDSGMSISIKNGKIDTKVYVNPIKESLNSYKDLLKNYNENQVDEMLNKLAPVIKNGYIETGFCARNNLIGTKLVIKKEIGDSENKGTLQLEIELYPKPLLPTDIKIPQPDYDKAYRDIKNGHVPQLNVEVILKGVLIGALAVVIIIGIASGAAELAGAITAFFAALA

SEQ ID NO: 6726 - protein, 184 aa, Enterococcus faecalis
KRKERGEIIMKKSLFILGTILLTTIAVQTGIETYASNNSFNQEQIESKASKPKTQYSELEFDTHEEAKDNIQVIPEKSGVPVDLGNNVIGYQEGGAGSRFITFHIKNYGVFIRTNSILGQDNVALSKEVVQVLSSIEKYPETDHGLIRADFASGMMSITWASDTFVKSVTSSDLRVSIEKALTK

SEQ ID NO: 6727 - protein, 159 aa, Enterococcus faecalis
MKCCVNLYKHTDKESSMDKIQELIIHMGLESNHMFILAMICCAMIIDFLSGVFAAKMNPKIDFQSRIGINGILKKIAALMLLIFFIPLAMTIPGNTGTGLLYVLYFGYLLMEIQSILENYQKIGIDVSLFQNFINRYSKSTMDNNKTNNSNEKEKKEEK

SEQ ID NO: 6728 - protein, 233 aa, Enterococcus faecalis
LFYVTKWIFSLHTFIKIEGSDYVKFWAEVTRLSDIYRFTNKEEDLINVMEYMERYIGVSAKNAKHRSELYKLCIPYEDFISSFDLAVWEALETYAGQEKVEHTFKNIVLFRMNLAEKSVWRLYKSNTCDSADKNGISYDSARWNELDSNTCQQKDAGIDIEEAICYKEMLKNYIKKFPKQSKFILLLLQGYTSCEASKLCQWGSNYDEKSRKRAQRTKQHFKKFLNEMLCESL

SEQ ID NO: 6729 - protein, 591 aa, Enterococcus faecalis
GDFMNYSQKAVNLCKKYSSFSLKAVAGRDGILSIGYGHLSNDRHPIKSGMTITESQAEQILRDDLSEHATLISKLLAIKATQNQFDALVSFSHSKGLGFLPSSDVMHFTNTKEFNSAAREMKLYVYDIGSIKLPKLVERRNAEASLYLEGASGNTETNNQARIGFDVMIRWMEGKKAQGVTYSMDYRLGPNSYDCSSAVYFALREAGFIPPTTYPGNTDSLFGQLERVGWSQLPLINGNYATQRGDIFIWGIRGNSGGEFGHTGIFIDENMIIHCNASTNVGITINSYDQYWVSAGRPTAAIYRFGGASKPYPGDSSGSKGDSVNPSAGVFYPSMRLPVSGDTDPNSPALDYYEAGQAIVYDSYVFANGYAWISYVAGSGLRRYVAVGPDDGRTDTVWGTGFLNNTPSGSGSNTGSALSGVFYPSMRLPVSGDTDPNSPALAYYEAGQAIIYDSYVFANGYAWISYIAGSGLRRYVAVGPDDGRTDTVWGTGFFDNGGDPGSQAHPNSIGLVPKAGNFVPNRKLPVSADTDPNSAALDYYEAGQSIGYDSYIFENGYAWISYIAGSGLRRYVAVGPDDGRTDTVWGKGFFN

SEQ ID NO: 6730 - protein, 280 aa, Enterococcus faecalis
NHLNIFCRDFFRIRLYMLIIISICDNRISNSFVLLLSTIKLVIDCIRRNIMKKLVFVALVVLLTGCSSQKTNESKNQEKSATNTTSVQKSTTNYSSSTESSSSTEIKETSTSSSTNQVSTTPKSEPSTNVEESNSLESAPYAVDISNLNNPLVFNFNGMNVPNSVTLENLNSTPTATFRTKLIGAENSQLKESINKYELSINTIPTKEIRIFSSGDNSIRTVKVNTELILGSNIYSNYERNISGNLYLFINKNGTISLITPNYAGNVTDDQKDVMQEVTQ

SEQ ID NO: 6731 - protein, 93 aa, Enterococcus faecalis
ILLPKINSVFTLTVLMLLSPDENILISFVGIVFIDNSYLLIDSFNWLFSAPINLVRKVAVGVEFKFSKVTELGTFIPLKLNTSGLFKLLISTA

SEQ ID NO: 6732 - protein, 67 aa, Enterococcus faecalis
KGWIRMAIKKGNKRAQSNLNLKQQEGLKYLKTKYRKSESKILAIGLEMLLEQEQAGLLIQNFIKGDY

SEQ ID NO: 6733 - protein, 228 aa, Enterococcus faecalis
RIVRPRRIPMDEKRKDKIQRLLTLANDANDEESMTALAKAQELMLAYGIDEEEVFHYQQHQRQEKVIDKVIYKGRPHKWVYRLAGIIAKNFRVKNYYQSSSDIELHYVGLSTDVEIAEITFLYAKGSVAFCSKEFMKQPEIKRKYKRKWQLKQDYIEGYLTALSSVFEKQVLTNGYELALQLPVAVHEEVSKLGLVKGKDTSHQVENFDAFHSGYQEGLQFKNKELIN

SEQ ID NO: 6734 - protein, 116 aa, Enterococcus faecalis
ERWEMSMEIRELIIIEDPCFYQYTTIKELESFNTSELTIALSVLRKEQRRLKEKVYHSGSGDQVDKNNVKLINKYRANLEKLLFIKQGYIPDAITQNMIDTLIKNNKKSIRKLQNG

SEQ ID NO: 6735 - protein, 156 aa, Enterococcus faecalis
RIKKNIAFGGIQMRRLSNTTMANETLKKEAWYRMMLTDLSSSVIDEFMETGKCHYTSNYFQGENILVTEEIEAIIKTAEKKYGFLVYYVTENKTADGQRFLSLFYVGRDTSDWLYCHRDLESYRQYVYVVNTTNPAFSKFGMIQFDPILGSLLRTS

SEQ ID NO: 6736 - protein, 255 aa, Enterococcus faecalis
VLKKIKNRKKRVRMTRLEQAQGKLQRLKRESEEMHHLIRAEHDRIPFGQPNIIGRGDIYKKVNGYHDRAIKLLKEQEKQEKRVEMLEKVEDFKEKNELIKDVHVVGKSSYATVGAKTSVNNIDYFKNELKELEKANEKAKAYNKTKPAIKARTYGAAITKLKNKIATLEQMKEADENKVVSDRTKELIESGAVTQWKKKPIFYFVKGLRKVALEIDENGEFFISNYYPACTDADKEFINKLLDPAAESTKKETFC

SEQ ID NO: 6737 - protein, 234 aa, Enterococcus faecalis; identical to SEQ ID NO: 6404

SEQ ID NO: 6738 - protein, 81 aa, Enterococcus faecalis; identical to SEQ ID NO: 6405

SEQ ID NO: 6739 - protein, 354 aa, Enterococcus faecalis
KEGVLFMFDYSKEPVNDYFLIDMKSFYASVECIERNLDPLTTELVVMSRGDNTGSGLILASSPEAKKRYGITNVSRPRDLPQPFPKTLHVVPPRMKLYIKRNMQVNNIFRRYVADEDLLIYSIDESILKVTRSLNLFTTEGTRSQRRKKLAQMIQERIKEELGLIAAVGVGDNPLLAKLALDNEAKNNEGFIAEWTYQNVPDKVWNIPEMTDFWGIGSRMKKRLNQMGIMSIKDLANWNPYTIKSRLGVIGLQLYFHANGIDRTDIAIPLEPSKEKSYGNSQVLPRDYTRRNEIELVVKEMAEQVAIRIRQHHCKTGCVHLHIGTSILETRPGFSHQMKIPITVLLQSFKSTIK

SEQ ID NO: 6740 - protein, 1467 aa, Enterococcus faecalis
SMFIKRRWRKQMDKTVIKPFEEIKYKVYGYTLPEVPNHNGYVKIGDTTREVVTRIFEQVGTAGLNPKILFEKVARKSDGEWFRDKDLHRFLILNGIEKKDFNSRADEWFYFNGTLEKAEELTNKFINRDYDEIQIDDKRSDYVLRNEQQQAVEKTYEYYQSNQEPKEFLWNAKPRFGKTLTTYDFIRNLNARNVLIVTNRPAIANSWFDDFNKFIAWQEPQMKFVSETDALNGKAMTRDQYLEFIDTTSHANPTQIAFISLQDLKGAEFAGGMYKKLEWVAGLNWDLLVIDEAHEGIDTRKTDIAFSQLKRDFTLHLSGTPFKALAKGDFSEEQIFNWSYVDEQEAKENWDPTIGSNPYESLPTLNLFTYQMSKMIEDEVSAGLTIEEEKNVDYAFDLNEFFRVKENGRFEYEESVVRFLDNLSSGKFPFSENQYRNELKHTFWLLPRVNSAKALEKLLNSHPTFKDYKVVLAAGDGVSLHDGVEAEALDLKENTKSFDKVRNAIEQNDKTITLSVGQLTTGVTIPEWTAVLMLNNIESPSLYFQAAFRSQNPYEYEEDGKLFRKENAYIFDFSPDRTLRLYDEFANNLSSGSSKTSEERKRKIKKLLNFFPVIAEDEEGTMHEIDASEVLTIPTRITSREVVKRGFMSNLLFANISGIFSGDSPFKEILDKIPPEKNKRLEKPREIPVTNPHLNDDGEVEIPKEVVIGKSKELFGEKIYTTIEVVDDVVSSLEEAEEKQKESIKRLAKNITESFSEGFTRLKDSFNLNKGQTDKLKDSVNNSIEDIINEKSLTLSNQVKELEKEYESKIQEAETIKDESILKAATHHYEKQKQKIEESFTEEINKEVEKTINTVVEEQIEKVEEKKKKTTEDDVRDHLRGFARTIPAFLMAYGVEDTRLENFEVNIDEATFEDLTSITIEEFKRLRDGFEYPDNNGETKVIPGLFNEVVFNASIQEFLETKNRLANYFDDSLQEDIFDYIPPQKTNQIFTPRRVVKSMVDSLEKRIPGIFSDKTRKFADLYVKSGMYITEIVKRLNHGLKDQIPNQQERIKWILENQVYACAPSNIIYNIAKNYILGEMEHVSNTNIIELDTLALAKEAKLSECIYKEFGDVKMKFDVIIGNPPYQEENTERNRDDAIYHLFLDEAYKIAEKVVMITPARFLFNVGSTPKIWNEKMLNDKHLSVEMYERKSEKIFPNTSIIGGIAVTYRDASKILGPIGTFTPYQELNSILSKVKEINQESNFSSLMFVQNKFNLDKLYRDFPDFETRLGGNGRERRLTSSIFNVLPEIFSDKKTKEHNLAIYGRENNKRTYKYVSKEYIEEHPNMYKWKVFVPAANGASGTIGDSPARIISFPVLGEPNSGHTQTFISLGAFDTKFEGEALLKYIKSKFARAMLGVLKVTQNNKTQETWSKVPVLDFTKDSDIDWEKPLPEIDQSIYKKFSLNQNEIDFIENHITYLDEESLNNL

SEQ ID NO: 6741 - protein, 277 aa, Enterococcus faecalis
KNKIKKRLVLNIKNERSDKERRVLCLNEEIIKSKLRVQKHGEVFTPKRIVKKMLNIPEIKEACENLTATFLEPAAGEGAFLLVILERKLNMVSKKYNNDLIQYENYSLLALTTLYGIELLEDNAQICVMNMFQQYYDNYKEQVEHHNGELKKKVLDSAKKIISLNIVNGNFLTRKSRDGNPLVFSEWQPVNMRKTSKNIKIQRTEYTLDEVYGSVKKENGRAINNLIQETVQLDLFDFWEDEIENIHEVQKEMRYIPVKIIDVYKEEMEEADGQDSN

SEQ ID NO: 6742 - protein, 403 aa, Enterococcus faecalis
RQPIHRKEDFPMNDFTTEIVQTLVTKGDLNELFRSHLEKAINTLLRTELTAFLDYEKYDRTGFNSGNSRNGSYFRSIKTEYGELTLEIPRDRNGEFKQQTLPAYKRTNDTLETTIIHLFEKGVTMSEIADLIEKMYGHHYTPQTMSNMTKVLTEEVNAFKSRALNDKYVAIFMDATYIPLKRQTVSKEAIYIAIGIREDGTKEVLSYAIAPTESTYVWNELLQDINSRGVQEVLLFITDGLKGMKDTIHQIYPKAKYQHCCIHVSRNIAHKVRVKDRKEICDDFKAVYQANSKEEANTFLSGMIEKWKKNYPKVTQSLIENQDLLTFYDFPPSIRRTIYSTNLIESFNKQIKRYSRRKEQFQNEESLERFLVSIFDTYNQKFLNRSHKGFQQVTDTLVSMFTE

SEQ ID NO: 6743 - protein, 902 aa, Enterococcus faecalis
LAVENISIRIKDNIKDIEKELDSLDRRIAKLKGQRPAIEWNTTKLKKAKEEIKNINVDIKKLQAQKATIKADVNTKDAKEKISALNQQIKQLQSRKANLQIVTTQLQGSEAQLRKLDNEISRLNNRKAMLQIDSRGLGETGEESRKLQNSLRSMSERTYKINVSSNLDKLSGLANNASNKILGAFNPLTSKLNQMLGIGLAVKAVDKATNMITNSIDGSISRLDTLNNFEKVMSNMNISADQADLAKSKLVKGLNGLPTTLDDAVASVQRFTANNKDVQKSADIFLALNNAILAGGMSRDIQSSALEQISQSYSKGKPDMIEWRSLLTAMPAQVDQIGKSFGLTSDQLGEALRNGNISMDQFMDRIVEMNKNGAEGFKSFEEQARNSVGGVRTGMSIMNSAITRGVTSIIDTFDKMAKDKGLGGIAGIFGKIGASFEKNLKKIGALAEEHSEDIFRFFDKGMQFLSKIDYASFFKGLGEGLKELKNDAKKMFDYFKPLLDKLGDGNTMEGIGKLIPRLFELGLALKAVSIGAKGLSVVSKVFGVFSKLKIPKFGKGGGASEIVKPLESLKSIGTGFLKNAGNLALLFGAIKVLEEGAEAMKQLDEKIPNDFTGLAKKTASMSLAISAIGGLAFIASKLNFTDNLKGIASIALISVDLMIASEAMNQLNEKVPNNIGIVAKKLGSLSITIGAMAGLVVIAGAFSSTNPTMAISGLASVALLSLELMIASEALSQLNEKVPSDIATIAKKVANIGIAIGAMGLLVGVIGGLSIATFPAAIAGLAAVALLAGELMLVSESINQLNKKVPEDITSVKNKLESLEEILSYMAKSSIGKISSLFKGIIGTFTASTYVQVIDGLIEVSNGLKRLASASEDINSAKLVNNIYDINKAVEVIGGASIILCK

SEQ ID NO: 6744 - protein, 124 aa, Enterococcus faecalis
NFYCISRKSPRSVQRSRCFFRIIVRDSLNNGVSLQQAQETYFAKFNHYSYMAHFVAKILGQRPSHVLSGWGVSELIVAYGHYANEQSYQNFMDWKSSQENAPKPKQPQPFVVQFISQDELEEVE

SEQ ID NO: 6745 - protein, 200 aa, Enterococcus faecalis
EKGIFVMKQSDLTKMITKNDVIDMKHKMDKTQDTSKPYAVIDNDNIAVVGDANEIQKVEENYVIKFRVPKEFFEEIPYGATTVDKYVIFEVEYSNASVTGMNDLKIVDALLNIQPFLKEFYQKDEDGKVTIVEKTDREVLKMLSTSEDEVIYGFYKVVAAFLGVDEELIEYMLPFSVIETFTALAENHPEVFKEADAFFG

SEQ ID NO: 6746 - protein, 448 aa, Enterococcus faecalis
EGLDMGKCNTEQVLSMIGVNKLTKTQELFFSVLQDNDSCVKIKTSDYLEIIGDKSAFNKYLRPEDAFNCLAEGCRNTGGLLITGNEFPLGATFKKVTDATDFYAGATTFYLDLPKDGTYTIEFKIAAINDNSFVNADVYRKKFTGTKGYNPIFIDFSVVPEEVLGEGWQANERGVHVSITVTTEEEIPLKQIHISSISFYNSIEELQNDEVVTIGCITEYGGDMTMDVADSVCFGAKYDPSSASITRTFTGGKTSGNYWLLNPFMRRGDLSKGWTVVKEKDKVRELTIDGRRYGYILLNGLSKQECSFSKALVASECNFTDAELTKVNLPDVAVLNEKQYQIIKHGEYDGYLIVHERLIGQPLLYAYPKEVSIEQYVGEDDAYEGRRVRLFFPTVQTDGVKVNYIFNNVLVTSFPTTLSNTDETTFEFEVSIQKDNNGRFFEVQKIIE

SEQ ID NO: 6747 - protein, 150 aa, Enterococcus faecalis
EVYQMAKRAINALAADGETTYQLSAKDYTIGDSEVTGVYDNEKAVTIKLFVDDVAVDEITPDNSKNIYAISTSKTTIVKDSKVEVAEYDADKNELTKILVTVIDPNGGGNEMDEKEKIDKFISRKLTVLNEKDGIVYEQLAIRVIQVNQK

SEQ ID NO: 6748 - protein, 129 aa, Enterococcus faecalis
MALKKIVIQSIEKEIDNYAKKMEKIIKEEAHVKTGALRDSITIEKESDGSRLIGVDVAKLKSDPRNVGGLDYSIPYYKGHSGYTIRPRKAKALSWVGKDGKRHFAKSVYIPPHAGDPFLKRAVLRRPKL

SEQ ID NO: 6749 - protein, 72 aa, Enterococcus faecalis
SMKVRFLGVREHISATGCSSCGAKRYASGLKTEKTFFLPSGKRLDVEFNHEYETTDTDGMFLLESGHFEEVF

SEQ ID NO: 6750 - protein, 239 aa, Enterococcus faecalis
GAYLMDEIIEQLKEFCDCFPCDVEDNKLEKTIKEAIHLISLLTCWTQRPCETFLMSERQEVFDMDNYLPCSCDDGIMELDLFYAPFALASFRVFSVHREGVKEIIRELDEKEFGYSVVKDKLLVDIRNYANRENGCCVCKKEHQLLVLYDAGFEELPQCLLQLFCDLIHVIYNKNNCDCHACATCQDNSDSGFIANETMTTDELVESYLNKLVIDSYRKQLGLISLCGKSLEQIWGIRV

SEQ ID NO: 6751 - protein, 393 aa, Enterococcus faecalis
QMVLEVNQAIVNESLQTEQVMEQLSSTVDVIVDNIEKYTNAARYGKGNNYALNNLRTAVQNQFPLVDWLLSTSLSQMIENAWQNGSLPTVTDEDGNVYLKAPLNVFTTPPKDTTGECCWLPFDISACGGKAPINILCLKDCVDMLNHLLDRKLKVQSNDLIGFFKQAGQTYEEVRDFMNRESMAFYTANTIVNGQLDVTTPILKKFHGLMEILKRPEVFKMQGTNILAAFDSIGYRMDVLGGSFIFAAHPLTVASIKNAIRPNRYGILPDGWTINGESIFYKGAQVLPDKTVPVDVENGTGVIWQLSGESVGVFLGTTLRPAEDYIIRNQFTTTHDLNKGCATECDIYYNLGSVVTNNVARLAVITDVPLAAGINAYSLANLLDRVYVETLAP

SEQ ID NO: 6752 - protein, 356 aa, Enterococcus faecalis
VIRSSILLEMRCNMFDFIKKRDAQTQARKRMKKDLDEIFEFNNEEKQQHTLNHIVQLANNDLKEIGWVRLLDEGTVLYGDGSIRSYIKRGTIKEFYDSLEDDYIGYINIGHINFATLPIFVGQWTKNDLRLVDIGENRQALEVNMKIDESLSVIQDLQKMPYTIGISAEFMASYDEELSYEYEFPVIEHLFIMGFGIVGDVGNVNSSGINLSAEEADKMALADLFGKKKENDQETIKEPETKQTESKEEPKEPEVETKKSEEQNVEENDKKESEAELSEKEDHTFEQLYNLSMEQNEKMVVELEQLRAENKSLKEEKLKQEQTNENAVQRLEKLMNRIEVSALPKATGSTKNKWGE

SEQ ID NO: 6753 - protein, 107 aa, Enterococcus faecalis
EGGEGMNYFKLVDGIRSPQSIDVVRSENGYKKFGWIRVLPDERYPLGDDEAFIQSLENASVEKLYSDKLVTELENNGIQFEVFNGGCCGGKIKKVSYKIIDIVRDEV

SEQ ID NO: 6754 - protein, 80 aa, Enterococcus faecalis
SRGKFKTRRKSWRKIKLGSVSMKQFKNNLEMFRYIDAINKEPSREFKIEPLREEIIIEPIEEDVESKANKKAKNKKGAKE

SEQ ID NO: 6755 - protein, 110 aa, Enterococcus faecalis
TMAKIKLPIVTINAKGGAQYVVEGVEAVNALTQLENYPERGIRIKVDGKMTVITEGCLCSAAVTGEVEVDVPEIVCAEVECEPISNILPNPKNPTDPGENSKPEEKAGEK

SEQ ID NO: 6756 - protein, 195 aa, Enterococcus faecalis
ARMKSLSNIALEYTTTSNEQKQRELFLLLVSYFLTLYDMEKENFADELGISSEFVEDAQIKFDYMKKIELTLQNMRETVQSEKGKDSEALTALYFNRILNTDGKKAKELAQIETVKHLTRLDRSKKIRKRWKAFSGCCDVCRAMDGVTVALDEPFMYQGQVVELSSGERYINNYAAMDTPNAHPNDKCSIEFIIE

SEQ ID NO: 6757 - protein, 181 aa, Enterococcus faecalis
GGNSVMSILEDLSKAKKKAKPYAVVGGREVYDYDSLEKKVEIDQAEAKVGGGQVDLGKMKPTKDGWGYTDMGNSFSAIPQDILFVNRYKKENDAYLIVTDYRAIKEQSSGQIYASSVQALVIKNKGEKGEEKMYLESIRNVSDTEFINDFTGELSNLSMAKVFEAIDKDKVKEVSKDEITF

SEQ ID NO: 6758 - protein, 426 aa, Enterococcus faecalis
MSETELVGKDELLKTMTMCNSCPDFNLNDLRGKGDNNYQLYDWLIHNLPTAQYVLGKLVKLILSNNLTTGDEKQDEILNNFLYGQTNPEGVTNYHVLVQSIKESIVYGRSGLRFLSKDDGLINVKCNHFGVAQILNKEHYGYKELIGFVIDKKGRAITDVDLSEGEIDSEEYFKKGIFVFKNNDNILLPPEKFVNLRVDTSTPKGSSVFDSDIQRVLLIASVYKRLLYDIEYDGAGRLIFWADNANSNEESSNKFLNDTESATKRRQDKYKKEVEEIMKLVKDSNSTSVLAVSNAFKKMDHLPRVTKATEFLSYLNQEGEIMAQVFGVPNVLLGLGKISGNISMEKVIDNAMLNSIIPLRENIATQISSILTNNLKVPKVYFDKYELKSQSDINDRRLKVLTVAERLKALGKDDLANKIIKEEIQL

SEQ ID NO: 6759 - protein, 529 aa, Enterococcus faecalis
QKNTLGVCLIMTLEIAQKRTIKLLKSSTPKEKLNKFVKGYVPTHYKRLSISMEKAIELAIIGATESLAYYGDRLYFTQALLMGAVVSGEYDNIIVVTPSQYGKSWLSSTISVWLADHNRRCYVAGGKKDTTDIIMQHVTDTLQTVDESIARKLLEPVDKLERLQTGLSKRKISFSGGGSIEGISLGEHFKGNKSGNQAIGRGGDYIIDESAFVSNETYAELGRRNFANVDGKNYLSFEISNPHNKGRFYDKLTQENIPKGMLVVWADVRTAFEEDRVKSIEQVISSEFFQNKSTCQRYFLCELPDENEDGMFGTPQTEEEHTEKDWEYFLGVDSAYKGKDKIKATLSALDAQGQVHVIDTIEIEKGDWQDGVTSKKIITQLLMIIEHFDVKGVCVDVGYGVYIVEGLAHINGDFELHGINFGAGTTKERVEKNHYSAKYGANKRAEMHIDLQENIDNRNIFFTEKVYEEVIDELVLISSKIKSNGKTAIVPKEEIKAKLGHSPDTLDSVLLSLHAIILYKLNERFYIYS

SEQ ID NO: 6760 - protein, 149 aa, Enterococcus faecalis
RYQVMIRRWLMMAGNDNLKPFSERSVDEARELGRKGGKASGEVRRKKADLKRAISIVLSSEVPSSKMAKTLKEMGYENTNEMAMVLSMTQKAIKGDVKAASWISNIIQPAKVEHEVEMSVGVDEKRKVAEEYIRGLFNNDTGNSTEENN

SEQ ID NO: 6761 - protein, 173 aa, Enterococcus faecalis
NLGRLLKKWEYLHKEVGNFHTALEEAGFLVKQELIWNKNSMVLSRQDYHWKHEPCLYGWASGGSHSWYSDRKQTTILNFDRPTVNKEHPTMKPVALFDYQIKNSSKQGDCILDLFGGSGTTLIACEQNEREAYLMELDPRYVDVIIARWEAFTGEVAVKISGNDTAVVDDGWK

SEQ ID NO: 6762 - protein, 243 aa, Enterococcus faecalis
AIFGFIQEAKAEQAIEALKEMSSPNANVRRDGHVITVKSDELVPGDIVLLEAGDVVPADLRLLEANSLKIEEAALTGESVPVEKEVTILEGTDIGIGDRINMAYSNSNVTYGRGLGVVVGTGMNTEVGKIAGMLASEQETETPLKQNLNQLGKMLTIAILVIAAVMFVVGMMNGRSWIDMLLTSISLAVAAIPEGLPAIVTIILALGTQKMAKKNAIVRKLPAVETLGSTDIICSETVFTKGW

SEQ ID NO: 6763 - protein, 139 aa, Enterococcus faecalis
HPLVKTVSEQIMSVLPNVSTAGNLRTIAFFLAIFWVPKAKIIVTIAGNPSGIAATANEIDVNNMSIHERPFIIPTTNITAAMTKMAIVNILPNWFKFCFKGVSVSCSLASMPAILPTSVFIPVPTTTPRPRPYVTLLLE

SEQ ID NO: 6764 - protein, 234 aa, Enterococcus faecalis
RLLLAGCNTTNNKGTTATSDSVAKSSESKTKDSVDLNSLDLPQLDDKVAEDQDLVQMVTSMGNIEIKLFPKQAPKTVENFMKHAKDGYYDGLTFHRVINNFMIQGGDPSGDGTGGNSIWNKPFEDEFSNQLYNIRGALSMANAGPNTNGSQFFIVQNTDDQSDGLLYDDYPKAIIDAYKKGGYPSLDKKHTVFGQVTKGMDIVDKIAKVEVGANDKPKTDVKIEKINILQEAKK

SEQ ID NO: 6765 - protein, 82 aa, Enterococcus faecalis
ERKIKGMTAMDNAQVKRKHFRFPAYDDEQGVKLPTDNERNLFQDDLIGKAMSGTNKLAILAKNSLQGAPSVQQPTRNSCLFI

SEQ ID NO: 6766 - protein, 181 aa, Enterococcus faecalis
FLYAPCTKSLREDQEVIETMFRKILREMALHLNNAAGERNLVMHCADLKTFIRTGETWAKNHAENQLLSTNTYYLEYFAMRKMQSNILKNMLELLEDITVDAQQVRYIQQLLEYTAETFAENNDGQEIMNRIKTVYETYRTKPLPQTRSEFENRARLFQFLQLFQSFIQVKADFAKLQLDK

SEQ ID NO: 6767 - protein, 179 aa, Enterococcus faecalis
RRGEREKRMLFVVIGTGIGGAIFRNGELYKGAHLYGGEFGLNFLSNGQTFSEIGTAVKMAQRYCERIGVEKQAVTGEEVFELAQRGDEIAREEVNNFYDYLTQGLFGLQFSYDPEMIVLGCGVSAKECLLAEINRRMLTHLPTFELKDIVPEIVTCHYQNDANLIGAAANFQAKTNWEL

SEQ ID NO: 6768 - protein, 218 aa, Enterococcus faecalis
  MISC_FEATURE (49)..(159): Amino acids 49, 157 & 159 are Xaa wherein Xaa = any amino acid.
TKGRPPGSSFHFQGFPVNGGFKRRFSRKSVSYFNIGTDLGKERRNPCEXFVTEYQPSLGWNSLKRKPQRLKQILKENVLKVEHIGSTSVPNLAAKPIIDFLFIVGEIEKVDLLQCEFERIGYEYMGEFGLSGRRYLRKGPIKRTHHVHIYQFDNTQXIXRHLAFRNYLRENPAIATTYGTLKKQLAQAHPDSIDKYMDGKDAFIKKIEKEALKKYWEK

SEQ ID NO: 6769 - protein, 126 aa, Enterococcus faecalis
PGFFGGQAGCAMIGQAVINVKSGGRKRLSTLISGITLLLFIFVFKSVMVAIPTAALIGIMMTVAVDTFDWESLQLFRTFEITEIVILLVTVGVIVYTHNLAIGIILGVLLSGLLYHFFKKEPKKSC

SEQ ID NO: 6770 - protein, 95 aa, Enterococcus faecalis
TITPTVTSKITISVISKVRKSCKLSQSKVSTATVIMIPINAAVGMATITDLKTKMNRRRVIPEIKVESRFRPPDLTLMTAWPIIAQPAWPPKKPG

SEQ ID NO: 6771 - protein, 256 aa, Enterococcus faecalis
YPTRGEACFRSWKANPQDIKVTDLLIQYYQRYLNNEEIESTISAIIRRYEDLFDELHLDKAVLADIAISIRQLATLPKENNAFLFDYFLASGEDNNAKVVASFFKQNGLDARYISPKELGLLVTPEPGNARILPKALEKISVYRETQQILVIPGFFGYTEAGEICTFSRGGSDITGSIVAAGVQADLYENFTDVDGIYVAHPGIIEQPQTIQELTYREMRELAYAGFAVLHDEALMPAYRANIPVVIKNTNNPHHP

SEQ ID NO: 6772 - protein, 203 aa, Enterococcus faecalis
  MISC_FEATURE (199)..(199): Amino acid 199 is Xaa wherein Xaa = any amino acid.
STPFEDEKGRLLYEYASQLPLVEMDTAYYGIPPKERVAEWVKAVPENFRFVMKVYSGISCQGEWQTYYASEEEMITAFLESMAPLIESKKLFAFLVQFSGTFGCTKENVAYLQKIRHWFKDLPIAIELRNNSWYQPNFVKQMLQFMKENQFSLVIVDEPQIPTNPVPFYPYVTNPNLVLFRFHGRNAAGWLANDAKWGXKKTP

SEQ ID NO: 6773 - protein, 259 aa, Enterococcus faecalis
QMQEQGHYSWDQVLVGVVDADGFSSENIVNELTAVFTDTTVCAAQTRIKMKDVTNFMFIAQDVEFFTINNFIQKARRATKTIGLGGNGQFFRLSMITEHLGYQPWGNALLDDYELTIKLMLKELSIAYIDEAFMAQEALRDVKRFIRQRSRWVQGNLDCLAYLPRVIKSKSLTLRQKCGIYYFLAQPFINLVAGMLVFVLTGLQLQHLYRLGFSLSLVISFVLPVSISLVFGIFFTINYYRELQNFQLKVPAALSSPRE

SEQ ID NO: 6774 - protein, 143 aa, Enterococcus faecalis
QKEMIQLSDQPKNWQEAITFAAQPLLSENKIEESYIKAMIERVEQYGAFIHIGDHIALPHARPEDGVNEVGMSLLKLQQPVDLLDNPAHPISLFICLAAIDNEAHLRALANLTKLLSNKQNLRDLLHASTKEEILAIIRKGDE

SEQ ID NO: 6775 - protein, 184 aa, Enterococcus faecalis
KEFKIMNPTIQPYQFNIIKEQVAVLLNTYTSVNDATTVKTVQALCAEKINGLFPEEHPAVTILLDKVMDRRLTRARAEKYLDELKETVLPFKEPSTPQVTKVFRKVKKLKIPEWENMDLRNNTYVGWNDAGTQKKFILAYRENKLIGVHGTLSPTIVKGVCSICQTITNVSMFLATTKSGGDGT

SEQ ID NO: 6776 - protein, 175 aa, Enterococcus faecalis
TQSRGLRPTSFNYSILINKRRILPMIKKVKKEALTTAHYALLYEADPSKKMVADYITRGICFDYQTEELQGILVLLPTHPRTLEIVNIAVSEESRGRGIGQELLHFAIDFAKKEKYDSLEIGTGSTGFQQLYLYQKVGFRMTHIEPDFFIHHYDEPIIENGLPLKDMVRLRLHLS

SEQ ID NO: 6777 - protein, 237 aa, Enterococcus faecalis
RPVTLDGVPDIQDVHSLIEILEIMGAKITFENNTLIIDPTEVVSVPMPKGKINSLRASYYFMGSLLGRFGEGVVGLPGGCYLGPRPIDLHIKGFEALGAHVTNEHGAMYLRTDEAGLQGTRIFMDMVSIGATINVMLAAVKAKGKTIIENAAREPEIIDIATLLNNMGAKVRGAGTDVIRIEGVEKLHGCRHSIIPDRIEAGTYLAMAAAMGERIKVRNVIYEHLESFIAKLQEMGV

SEQ ID NO: 6778 - protein, 220 aa, Enterococcus faecalis
SEGKLMQFFSPIIIKFALGINGLIVQINLMGIANLAPTSDMDQVQNYVLGGIIGGVIHNDSITVLQFVLVLILWTLLVLILKFAKEHNRYVKQIVDGKPITLIKDGQVVVKECLKNGISANDLMFKLRANGIYEVQLVKRAVLEQNGQLTIVEYGDESIRYPIIVDGQANMDVLELIKKDEHWLLTQIQEQGFQRLQEIYLGEYLSGQLSLSPYEEKTIA

SEQ ID NO: 6779 - protein, 63 aa, Enterococcus faecalis
FCTWSISDVGAKFAIPIKLIWTINPLIPRANLIIIGLKNCISFPSLYFMISIAGVNKYVSCYV

SEQ ID NO: 6780 - protein, 81 aa, Enterococcus faecalis
GRLIVYSLNLFKGVNIPMIHGTKISIHMFTNENLVEPMAQEKKFSPEKFYVNGTQLGDGTLVKIEEVFNKMSLRTDQHFYT

SEQ ID NO: 6781 - protein, 249 aa, Enterococcus faecalis
  MISC_FEATURE (15)..(15): Amino acid 15 is Xaa wherein Xaa = any amino acid.
TRLYREKQLTLETTXGRLSTRMIDVFAPIGFGQRGLIVAPPKAGKTSVLKEIANGITENHPDVELILLLIDERPEEVTDLERSVKGDVVSSTFDQQPQNHTRVAELVLDRAMRLVEDKRDVVILMDSITRLARAYNLVVPPSGRTLSGGIDPAAFFKPKRFFGAARNIEEGGSLTILATALVDTGSRMDDVIYEEFKGTGNMELHLSRELAERRIFPAIDIKKSSTRKEELLMTPEQLEETAVFTTSGP

SEQ ID NO: 6782 - protein, 146 aa, Enterococcus faecalis
SQWSTFAINPLRLCYHKSEVMRMKLDMVGIIVNDMTQALSFYQTLGFNVLEEASPDYTELQNNGVRISLNSLQMITGVYGFAPSQQGDKIELAFLCETAAEVDNTVKKMSQAGYIVFKEPWNAPWGQRYAIIKDVDANLISLFAPL

SEQ ID NO: 6783 - protein, 62 aa, Enterococcus faecalis
LKEMRNVSVTLSRKIVNIISILGIVATIIATIYFIRLGVFKDFHVLRRTIWESGLPRSNNSR

SEQ ID NO: 6784 - protein, 271 aa, Enterococcus faecalis
  MISC_FEATURE (13)..(13): Amino acid 13 is Xaa wherein Xaa = any amino acid.
VIESIRTRNCQWXKVYVIGNFKGGVGKTKTVTMLAYESALQLGRKTLVIDLDPQGNATRVLAKTGDLAEITYTVTEAFQEGSLEPAITNISENLDLIPANTAFRNLTKILMTKFPSNEFDQINYLNTLLKPLKEKYDAIYIDVPPTISDFSDNAMLAADYCIIVLQTQELSLDGAQTYIAYMQYLADTYDNDLQVLGIIPCMLRPAGRVDNKVLEQAKELYGGNVLNTVVKYQERVKVYDVEGIKISHNYTGKADGWDVKAHKGIYDVLMN

SEQ ID NO: 6785 - protein, 135 aa, Enterococcus faecalis
RPIPVVKTRDASSAVIQESDTLDRSIDDLLLDYETTNQEFAQLVIAINQRNAVAKIGEQETIAAALEKREALRRSHAMLTATLEAAKVAPRMGRNEIRMIRTIDTKQITDRLNQTAKALRELDGQIQQTNWLVDL

SEQ ID NO: 6786 - protein, 66 aa, Enterococcus faecalis
RKRKAPGTHLPPSLQPSVEPNGRRLEVAQGIGHLDHVQKIKQSVRGFLADVNERPLEVIDRLCVRM

SEQ ID NO: 6787 - protein, 167 aa, Enterococcus faecalis
FKYMGFDGNLFETYPIMFNTMMKALEDRQVLLNPKAVYRLLKENSSKALTDKYHLDFREFSDDFHQYETLDTRQPVTFDHVYDTLTQLKQQGSKHYILTHRTIASTRELLVKEGMLEFFEENARRLALIFLPPYSPQLNLMEGVWKWLKESVILTTSRKSNSRSAVS

SEQ ID NO: 6788 - protein, 256 aa, Enterococcus faecalis
VILLSNILNIIRIGVLSMSDKEQLEKLDKSFLGQPKGLATLFFTEMWERFSYYGMRAILMYYIYDTVANGGLGLPKATALAIMSIYGSMVFMSSIIGGWVSDRVLGSRKTVFIGGLLIIAGHIVLATPFGVPALFLSIMLIVFGTGMLKPNVSGMVGHLYSKTDLRRDAGFSIFYMGINIGALIAPLVVGTLGLEYNYHLCFSVAAVWMFFGLLQYYFQRRKSLAGIGQAPTNPMSKEEQKKLAKAFMLAIVVGLT

SEQ ID NO: 6789 - protein, 206 aa, Enterococcus faecalis
DTVQSAGFSPLIVSAMSFFIFAGSAQFVTVSMLTGGSPILSIVLATFLVNARMILMGMTIAPYFKAESLGKNLWLGTLLTDESFALGMNKLNHTKGRLSFEWFNAANLISYATWVFSTIIGAYLGRFIANPQALGLEFAVVAMFIGLLYLQIISDRSMKIALQLIMVLITFGLMSIGLIFIPSNLIVLVVTLIGCGIRVMIKHAFF

SEQ ID NO: 6790 - protein, 229 aa, Enterococcus faecalis
  MISC_FEATURE (2)..(28): Amino acids 2, 11 & 28 are Xaa wherein Xaa = any amino acid.
PXRCEEPMPFXKNYVYTDTTKSNLQVQXEKAEVSEDGLTYKIKLNKDAKWSDGKPVTANDYVYGWQRTVDPATASEYAYLYASVKNGDAIAKGEKDKSELGIKAVSDTELEITLEKATPYFDYLLAFPSFFPQRQDIVEKYGKNYASNSESAVYNGPFVLDGFDGPGTDTKWSFKKNDQYWDKDTVKLDSVDVNVVKESPTALNLFQDGQTDDVVLSGELAQQMANDPA

SEQ ID NO: 6791 - protein, 219 aa, Enterococcus faecalis
LRAQVMPLCFSWGGLKLEKALNVFAINVQGKTMLDIGSSTGGFTDVALQNGARLSYALDVGYNQLAWKIRQDERVVVMERTNFRYSKPEDFTEGVPDIATIDVSFISLRLILPPLHDILKKGGSVVALIKPQFEAGKEFVGKKGIVRDPETHQMVVEEITRFAMNNGYDVKNLDFSPITGGEGNIEFLAHLVSVEGEGSYQAPKSIEKVVAHAPQKLAE

SEQ ID NO: 6792 - protein, 257 aa, Enterococcus faecalis
VLTGDNDIVPKKVFKDVRIEVSHGLLGSQIEAMTDEELRAQVEETNLFATLYPMQKFQISELLQAKGHTVGFMGDGINDAPALRKADVGISVDTAADITKDASSIILLEKSLNVLESGVIEGRKVFSNMMKYIKITISSNFGNVFSILVASAFLPFLPMLSLQLLIQNLIYDVAQLTIPWDNVDEEELLSPVRWETNGLAKFTVCIGPVSSIFDILTYLVMWFVFSANSLATQHLFQTGWFMVGLVSQTGLQPGKGE

SEQ ID NO: 6793 - protein, 80 aa, Enterococcus faecalis
PFIPPSFRGEGITARGGILPDDTKPGGWRLYNRLAGKKKMSHKEASFFILKDEKGANIELVPGDVLIQPKGSALKRYPAP

SEQ ID NO: 6794 - protein, 243 aa, Enterococcus faecalis
TQLVLKTARVIDTAQIYGNESGTGAGIKAGLAATGLNREDLFVTSKVWNAHISYDETIQAFNDSLERLGLDYLDLYLIHWPGNNSYKESWQALETLYAEGKVKAIGVSNFQVHHLEDLLSYAKVVPVINQVELHPKLDQKEVRDFCEKHDIKVQAWSPLMQGQLLSNETILAIAENHNKSAAQVILRWDIQQDILLAVKSVHKERMISNAAVFDFELSAEEMAQINQLNESLRVGPDPDTFDF

SEQ ID NO: 6795 - protein, 95 aa, Enterococcus faecalis
  MISC_FEATURE (72)..(72): Amino acid 72 is Xaa wherein Xaa = any amino acid.
LGGDTMSEAVKGFSVVNHVGITVSNLDESVKFYEALTGTKIANRDEIGGKRMAQTQRLDDTLIKYANVHLEXINIDLLKYVKTKSKKTSYSNETN

SEQ ID NO: 6796 - protein, 71 aa, Enterococcus faecalis
KIGCTNEKIDFTYISDPGHIAYFSGYESEPHERVLALFIAADDQSFLFTPALEVEDAAKEYLDLSRLWLFR

SEQ ID NO: 6797 - protein, 210 aa, Enterococcus faecalis
LCLSLRTTNHFYLHLHWKSKMPQKSTWTYPVYGYLDSENPWEKIAALLNKRTQGTPRFALEKQALSLARFDQLKTYFPASDFSHDVTPLIEKLQLIKTEPEIQRLLEAGSWADVAFEIGFKAIQAGVAEQEIVAEIEYQLKRQGIRSMSFDTLVLTGKNGASPHGVPGETKIEPHDLVLFDLGVVHNGYCSDATRTVSYLEPSDFQKEIY

SEQ ID NO: 6798 - protein, 218 aa, Enterococcus faecalis
GMKLNGIIMIAVVGSVLSSCGWQKSKEESQKVQTVQTNNVNTEETRAISATEVSQTTALELEQTTQTQELTELVTEEGTIWNQQKAKQLGQYMETWGQERNQNYQAYQPGHSVAFYTIQVPDDLLSYEPKIQPAIGNNPIWLNWSETGSEGGYCLVAVYSDSATQVAQKHVYLFTLVNGEAKVYVSKEQPVEEQPYLFLKETSNTELKEQFTNLVNNL

SEQ ID NO: 6799 - protein, 144 aa, Enterococcus faecalis
TSYPFLALMSVVFGPVAGGLIGLIGHTLKDFTTYGSAWWSWIICSGIIGIIFGFAGRKMDLQHGEFTTNDMVRFNIFQAFGNIVVWGLIAPSLDILIYSEPASKVFTQGVFATVSNIVAVGIIGTLLMKAYASTRTKKGSLSKD

SEQ ID NO: 6800 - protein, 68 aa, Enterococcus faecalis
  MISC_FEATURE (10)..(47): Amino acids 10, 35 & 47 are Xaa wherein Xaa = any amino acid.
RRKSLIVGPXGYGKSTLAQCINGVIPNIYEGYIQXTATVAGKNIQDXKSIWICSFDVRAVFTRYRWAV

SEQ ID NO: 6801 - protein, 199 aa, Enterococcus faecalis
KGGVKKGPTTIGDFSKVQDLDNEISTNYVGEVDKNELVEGALKGMSEAIGDPYSTYLNESAANDLNESLSGDFEGIGATMTMKDGEPVVAEAPVADSPAEKAGIKEGDIIEKVDGTATKGMKLAEVVSKVRGKKGTSVELTIQREGETKNMSIKRGKIPVKTVTGELDKNDAQIGSIKITSFGKQTYQELKETITNLSD

SEQ ID NO: 6802 - protein, 85 aa, Enterococcus faecalis
SPWWALRKGVSKGSGVKNLFNTLGLNGIPTYAFGDGINDLALFEACDYGIAMGNAREELKEKATFISTKNTENGIVNGLKKFDLL

SEQ ID NO: 6803 - protein, 83 aa, Enterococcus faecalis
ETSYPKHRKTKGSIKMDNQWLLYGISSVVLIILIRRTILSGNIVLSCLLGAILLIQVVGVALCAQQKKKNEHTKELPSSKVHQ

SEQ ID NO: 6804 - protein, 259 aa, Enterococcus faecalis
  MISC_FEATURE (238)..(246): Amino acids 238, 245 & 246 are Xaa wherein Xaa = any amino acid.
YTKSELEMKGAIPLVNSEKRKQLIIDTCILAGKIMLESGSEVYRTEDTITRIAANAGEPESVCYTTATGIFVGFRSSNYTQLENIPQRSINLEKVSLVNQLSREFAQKEITLPELYQRLTLLETDTPTFSISLRLLAAGIVSCTLMYIFGGTWQDFIATFFVGVIGYASYLFTQKLFQVPYLDSFAAAFVIGLLAYLAVHFHLAVNIDNIINGCGNALVPGVANTNSFREHLTGPPHXRERRKGXXLILLLGSLALGFA

SEQ ID NO: 6805 - protein, 70 aa, Enterococcus faecalis
  MISC_FEATURE (23)..(31): Amino acids 23, 30 & 31 are Xaa wherein Xaa = any amino acid.
CVSSRCGEYELFSRTFNRATSSXGTAQREXXYFIAGFVGPGICLNFKIIIVRDVQMGTIFPPPLKFLTKV

SEQ ID NO: 6806 - protein, 188 aa, Enterococcus faecalis
LEKFPKVDILVNNMGIYEPMEYWDIDDATWEKFFTVNVLSGNALAKAYLPKMLAQDFGRIIFIASEEAVMPSGEMPQYSMTKTMNLSLAKSLSNLTVGTHVTVNTVMPGSTLTEGVEKMLEDMYADSDIPKEDWEKDFMKNHRSRSQIQRLIRPEEIGRFVTFVASPDSSSFSGEALRIDGGLVPTIF

SEQ ID NO: 6807 - protein, 108 aa, Enterococcus faecalis
  MISC_FEATURE (18)..(18): Amino acid 18 is Xaa wherein Xaa = any amino acid.
ALSHLLLLRLEEWVAYSXKKIQLYFQANRLKSAIRTIILGSVVAVFARWFWHFWAGVLVWGMYAPKGMSPYLYSFVLNGTSTVVNCLYVSLVLGLLAKVAPQLFVPKK

SEQ ID NO: 6808 - protein, 142 aa, Enterococcus faecalis
GKKQVISHGSLIQTYLEREAEEWIQHKVTFKAIFKLITLSSQHFFSAFLEDSQDQKNKEKERSALLQELQVAAAQKSLVVLQLKEVPTAHKFETVIGWIVSKNISDNIVVRLQTDEQQLRMIPVASVMKVSTLANRHQRQIH

SEQ ID NO: 6809 - protein, 177 aa, Enterococcus faecalis
  MISC_FEATURE (176)..(176): Amino acid 176 is Xaa wherein Xaa = any amino acid.
LNNKRRVNRSLVFFLYKCKQIVIAKKGVDKVPLKSKEPRLDFPIEAITNNFLFTTSNDVWVGYKLAHQVFPLNNLDFFKEYIEDGKGVFEQDTFDYHFMNIPEYFDLDEQIEATIDNLVKGSFADLGETYFRQAGDILKDEVQMNKYSTYLFIRFTAPIQVTKTYGVFRIFAEVPXL

SEQ ID NO: 6810 - protein, 151 aa, Enterococcus faecalis
KYDIKNLQAWKERKSVLTQDDLDYLIKYKYESLDNFGLGITPIENFPDKEVAIQYIKDQSWYIFFESILDSYNDSEEKLLEVDASYPFRYFLQYARLFLLDLNSELNICTKEFIINLLETLTQELIHLTSKTLVLDLHTFKKNEPLKGNDR

SEQ ID NO: 6811 - DNA, 15 bp, Artificial Sequence
  Artificial sequence is a primer.
gtcttcaccacgggg

SEQ ID NO: 6812 - DNA, 11 bp, Artificial Sequence
  Artificial sequence is a primer.
gtggtgaagac
